(19) United States
(12) Patent Application Publication
(10) Pub. No.: US 2025/0195673 A1
(43) Pub. Date: Jun. 19, 2025

(54) COMPOSITIONS AND METHODS FOR SELECTIVE DEPLETION OF TARGET MOLECULES

(71) Applicants: Fred Hutchinson Cancer Center, Seattle, WA (US); Blaze Bioscience, Inc., Seattle, WA (US)

(72) Inventors: Zachary CROOK, Bothell, WA (US); James OLSON, Seattle, WA (US); Roland K. STRONG, Seattle, WA (US); Natalie Winblade NAIRN, Seattle, WA (US); Stephen TAPSCOTT, Seattle, WA (US); Kenneth GRABSTEIN, Mercer Island, WA (US)

(21) Appl. No.: 18/037,923

(22) PCT Filed: Nov. 29, 2021
(86) PCT No.: PCT/US2021/061035

§ 371 Date: May 19, 2023

Related U.S. Application Data
(60) Provisional application No. 63/119,195, filed on Nov. 30, 2020.

(51) Int. Cl. A61K 47/64; C07K 14/00; C07K 16/28

(52) U.S. Cl. CPC A61K 47/64; C07K 14/001; C07K 16/2863; C07K 2317/569; C07K 2317/92

(57) ABSTRACT

Described herein are compositions and methods for selective depletion of target molecules using a recyclable CDP-receptor-binding mediated complex to elicit endocytosis and cellular degradation of the target. Exemplary compositions containing a peptide, such as a CDP peptide, that bind a transferrin receptor can be linked to a peptide that binds a target molecule. Such compositions can be used to selectively recruit the target molecule to endosomes via transferrin receptor-mediated endocytosis of the composition and the bound target molecule. Once inside the endosome, the acidic pH can lead to release of the target molecule from the composition due to pH-dependent binding of the composition for the target molecule, and the transferrin receptor portion is recycled back to the cell surface for “reloading”. The target molecule can then be trafficked into lysosomes wherein it is degraded.

### CROSS-REFERENCE

[0001] The present application claims the benefit of U.S. Provisional Application No. 63/119,195, entitled “COMPOSITIONS AND METHODS FOR SELECTIVE DEPLETION OF TARGET MOLECULES,” filed on Nov. 30, 2020, which application is herein incorporated by reference in its entirety for all purposes.

### SEQUENCE LISTING

[0002] The instant application contains a Sequence Listing which has been submitted electronically in ASCII format and is hereby incorporated by reference in its entirety. Said ASCII copy, created on Nov. 24, 2021, is named 108406-702531_SL.txt and is 665,995 bytes in size.

### BACKGROUND

[0003] Accumulation or over-expression of soluble and cell surface proteins is indicated in a variety of human diseases, ranging from neurodegenerative diseases to cancer. Furthermore, numerous diseases are associated with mutations in soluble or cell surface proteins resulting in constitutive activity, resistance to treatment, or dominant negative activity. However, many of these proteins have been deemed “undruggable,” “difficult to drug,” or “yet to be drugged” targets due to challenges in targeting them with small molecule therapeutics. For example, in the neurodegenerative Alzheimer's disease, the amyloid protein which accumulates to form plaques in the brain as a marked aspect of the disease lacks therapeutic agents that target the protein despite its critical role in neurodegeneration. There is a need for compositions and methods to target and selectively deplete soluble and cell surface proteins associated with disease.

### SUMMARY

[0004] In various aspects, the present disclosure provides a peptide complex comprising: a cellular receptor-binding peptide; and a target-binding peptide complexed with the cellular receptor-binding peptide, wherein (i) the target-binding peptide is engineered to have an affinity for a target that is lower in an endosome than in an extracellular environment, (ii) the cellular receptor-binding peptide is engineered to have an affinity for a cellular receptor is lower in an endosome than in an extracellular environment, or both (i) and (ii).

[0005] In some aspects, the affinity of the target-binding peptide for the target, the affinity of the cellular receptor binding peptide for the cellular receptor, or both is pH dependent. In some aspects, the affinity of the target-binding peptide for the target, the affinity of the cellular receptor-binding peptide for the cellular receptor, or both is ionic strength dependent.

[0006] In various aspects, the present disclosure provides a peptide complex comprising: a cellular receptor binding peptide; and a target-binding peptide complexed with the cellular receptor-binding peptide, wherein (i) an affinity of the target-binding peptide for a target is pH dependent, (ii) an affinity of the cellular receptor-binding peptide for a cellular receptor is pH dependent, or both (i) and (ii).

[0007] In some aspects, the cellular receptor-binding peptide is a transferrin receptor-binding peptide or a PD-L1-binding peptide. In some aspects, the cellular receptor-binding peptide is a transferrin receptor-binding peptide. In some aspects, the cellular receptor-binding peptide is a PD-L1-binding peptide. In some aspects, the cellular receptor is a transferrin receptor or PD-L1. In some aspects, the cellular receptor is a transferrin receptor. In some aspects, the cellular receptor is PD-L1.

[0008] In some aspects, the cellular receptor-binding peptide binds to the cellular receptor at a pH of from pH 4.5 to pH 7.4, from pH 5.5 to pH 7.4, or from pH 6.5 to pH 7.4. In some aspects, the cellular receptor-binding peptide is capable of binding the cellular receptor with a dissociation constant (KD) of no more than 100 nM, no more than 20 nM, no more than 10 nM, no more than 5 nM, no more than 2 nM, no more than 1 nM, no more than 0.5 nM, no more than 0.4 nM, no more than 0.3 nM, no more than 0.2 nM, or no more than 0.1 nM at pH 7.4. In some aspects, the cellular receptor-binding peptide is capable of binding the cellular receptor with a dissociation constant (KD) of no more than 100 nM, no more than 20 nM, no more than 10 nM, no more than 5 nM, no more than 2 nM, no more than 1 nM, no more than 0.5 nM, no more than 0.4 nM, no more than 0.3 nM, no more than 0.2 nM, or no more than 0.1 nM at pH 5.5. In some aspects, the affinity of the cellular receptor for the cellular receptor is pH-independent. In some aspects, the affinity of the cellular receptor-binding peptide for the cellular receptor at pH 7.4 and at pH 5.5 differs by no more than 2-fold, no more than 5-fold, no more than 10-fold, no more than 15-fold, no more than 20-fold, no more than 25-fold, no more than 30-fold, no more than 40-fold, or no more than 50-fold.

[0009] In some aspects, the affinity of the cellular receptor-binding peptide for the cellular receptor is pH dependent. In some aspects, the affinity of the cellular receptor-binding peptide for the cellular receptor decreases as pH decreases. In some aspects, the affinity of the cellular receptor-binding peptide for the cellular receptor is higher at pH 7.4 than at pH 5.5.

[0010] In some aspects, the affinity of the target-binding peptide for the target is pH dependent. In some aspects, the affinity of the target-binding peptide for the target decreases as pH decreases. In some aspects, the affinity of the target-binding peptide for the target is higher at a higher pH than at a lower pH. In some aspects, the higher pH is pH 7.4, pH 7.2, pH 7.0, or pH 6.8. In some aspects, the lower pH is pH 6.5, pH 6.0, pH 5.5, pH 5.0, or pH 4.5. In some aspects, the affinity of the target-binding peptide for the target is higher at pH 7.4 than at pH 6.0. In some aspects, the affinity of the target-binding peptide for the target is higher at pH 7.4 than at pH 5.5. In some aspects, the target-binding peptide is capable of binding the target molecule with a dissociation constant (KD) of no more than 100 nM, no more than 20 nM, no more than 10 nM, no more than 5 nM, no more than 2 nM, no more than 1 nM, no more than 0.5 nM, no more than 0.4 nM, no more than 0.3 nM, no more than 0.2 nM, no more than 1 nM, or no more than 0.1 nM at pH 7.4. In some aspects, the target-binding peptide is capable of binding the target molecule with a dissociation constant (KD) of no less than 1 nM, no less than 2 nM, no less than 5 nM, no less than 10 nM, no less than 20 nM, no less than 50 nM, no less than 100 nM, no less than 200 nM, or no less than 500 nM at pH 5.5. In some aspects, the affinity of the target-binding peptide for the target at pH 7.4 is at least 2-fold, at least 3-fold, at least 4-fold, at least 5-fold, at least 6-fold, at least 7-fold, at least 8-fold, at least 9-fold, at least 10-fold, at least 15-fold, or at least 20-fold greater than the affinity of the target binding peptide for the target at pH 5.5. In some aspects, the target-binding peptide comprises one or more histidine amino acid residues. In some aspects, the affinity of the target-binding peptide for the target decreases as ionic strength increases. In some aspects, the target-binding peptide comprises one or more polar or charged amino acid residues capable of forming polar or charge-charge interactions with the target molecule.

[0011] In some aspects, the cellular receptor-binding peptide is conjugated to the target binding peptide. In some aspects, the cellular receptor-binding peptide and the target binding peptide form a single polypeptide chain. In some aspects, the peptide complex comprises a dimer dimerized via a dimerization domain. In some aspects, the dimerization domain comprises an Fc domain. In some aspects, the dimer is a homodimer dimerized via a homodimerization domain. In some aspects, the homodimerization domain comprises a sequence that has at least 80%, at least 90%, at least 92%, at least 93%, at least 94%, at least 95%, at least 96%, at least 97%, at least 98%, or at least 99% sequence identity with any one of SEQ ID NO: 245-SEQ ID NO: 259. In some aspects, the dimer is a heterodimer dimerized via a first heterodimerization domain and a second heterodimerization domain. In some aspects, the first heterodimerization domain comprises a sequence that has at least 80%, at least 90%, at least 92%, at least 93%, at least 94%, at least 95%, at least 96%, at least 97%, at least 98%, or at least 99% sequence identity with any one of SEQ ID NO: 260, SEQ ID NO: 262, SEQ ID NO: 264, SEQ ID NO: 266, SEQ ID NO: 268, SEQ ID NO: 270, SEQ ID NO: 272, SEQ ID NO: 274, SEQ ID NO: 276, SEQ ID NO: 278, SEQ ID NO: 280, SEQ ID NO: 282, SEQ ID NO: 284, or SEQ ID NO: 286. In some aspects, the second heterodimerization domain comprises a sequence that has at least 80%, at least 90%, at least 92%, at least 93%, at least 94%, at least 95%, at least 96%, at least 97%, at least 98%, or at least 99% sequence identity with any one of SEQ ID NO: 261, SEQ ID NO: 263, SEQ ID NO: 265, SEQ ID NO: 267, SEQ ID NO: 269, SEQ ID NO: 271, SEQ ID NO: 273, SEQ ID NO: 275, SEQ ID NO: 277, SEQ ID NO: 279, SEQ ID NO: 281, SEQ ID NO: 283, SEQ ID NO: 285, or SEQ ID NO: 287.

[0012] In some aspects, the target-binding peptide is linked to the dimerization domain via a peptide linker. In some aspects, the cellular receptor-binding peptide is linked to the dimerization domain via a peptide linker. In some aspects, the cellular receptor-binding peptide is linked to the target binding peptide via a peptide linker. In some aspects, the peptide linker has a length of from 1 to 50 amino acid residues, from 2 to 40 amino acid residues, from 3 to 20 amino acid residues, or from 3 to 10 amino acid residues. In some aspects, the peptide linker comprises glycine and serine amino acids. In some aspects, the peptide linker has a persistence length of no more than 6 Å, no more than 8 Å, no more than 10 Å, no more than 12 Å, no more than 15 Å, no more than 20 Å, no more than 25 Å, no more than 30 Å, no more than 40 Å, or no more than 50 Å. In some aspects, the peptide linker is derived from an immunoglobulin peptide. In some aspects, the peptide linker is derived from a double-knot toxin peptide. In some aspects, the peptide linker comprises a sequence of any one of SEQ ID NO: 129-SEQ ID NO: 141, SEQ ID NO: 195-SEQ ID NO: 218, SEQ ID NO: 223-SEQ ID NO: 227, or SEQ ID NO: 391.

[0013] In some aspects, the cellular receptor-binding peptide, the target-binding peptide, or both comprises a miniprotein, a nanobody, an antibody, an antibody fragment, an scFv, a DARPin, or an affibody. In some aspects, the antibody comprises an IgG, or wherein the antibody fragment comprises a Fab, a F(ab)2, an scFv, or an (scFv)2. In some aspects, the miniprotein comprises a cystine-dense peptide, an affitin, an adnectin, an avimer, a Kunitz domain, a nanofittin, a fynomer, a bicyclic peptide, a beta-hairpin, or a stapled peptide. In some aspects, the cellular receptor-binding peptide comprises at least one disulfide bond, at least two disulfide bonds, at least three disulfide bonds, or at least four disulfide bonds.

[0014] In some aspects, the target-binding peptide comprises at least one disulfide bond, at least two disulfide bonds, at least three disulfide bonds, or at least four disulfide bonds. In some aspects, the cellular receptor-binding peptide comprises at least six cysteine residues. In some aspects, the at least six cysteine residues are positioned at amino acid positions 4, 8, 18, 32, 42, and 46 of the cellular receptor-binding peptide. In some aspects, the at least six cysteine residues form at least three disulfide bonds.

[0015] In some aspects, the cellular receptor-binding peptide comprises a sequence of any one of SEQ ID NO: 148-SEQ ID NO: 177. In some aspects, the cellular receptor-binding peptide comprises a sequence that has at least 80%, at least 90%, at least 92%, at least 93%, at least 94%, at least 95%, at least 96%, at least 97%, at least 98%, or at least 99% sequence identity with any one of SEQ ID NO: 96, SEQ ID NO: 65-SEQ ID NO: 95, SEQ ID NO: 97-SEQ ID NO: 128, SEQ ID NO: 220-SEQ ID NO: 222, or SEQ ID NO: 1-SEQ ID NO: 64, or at least 80%, at least 90%, at least 92%, at least 93%, at least 94%, at least 95%, at least 96%, at least 97%, at least 98%, or at least 99% sequence identity with a fragment of any one of SEQ ID NO: 96, SEQ ID NO: 65-SEQ ID NO: 95, SEQ ID NO: 97-SEQ ID NO: 128, SEQ ID NO: 220-SEQ ID NO: 222, or SEQ ID NO: 1-SEQ ID NO: 64. In some aspects, the cellular receptor-binding peptide comprises a sequence that has at least 80%, at least 90%, at least 92%, at least 93%, at least 94%, at least 95%, at least 96%, at least 97%, at least 98%, or at least 99% sequence identity with SEQ ID NO: 96, or at least 80%, at least 90%, at least 92%, at least 93%, at least 94%, at least 95%, at least 96%, at least 97%, at least 98%, or at least 99% sequence identity with a fragment of SEQ ID NO: 96. In some aspects, the cellular receptor-binding peptide comprises a sequence of SEQ ID NO: 96. In some aspects, the cellular receptor-binding peptide comprises a sequence of any one of SEQ ID NO: 392-SEQ ID NO: 399. In some aspects, the cellular receptor-binding peptide comprises a sequence that has at least 80%, at least 90%, at least 92%, at least 93%, at least 94%, at least 95%, at least 96%, at least 97%, at least 98%, or at least 99% sequence identity with any one of SEQ ID NO: 187, SEQ ID NO: 233-SEQ ID NO: 239, SEQ ID NO: 400-SEQ ID NO: 456, or SEQ ID NO: 241, or at least 80%, at least 90%, at least 92%, at least 93%, at least 94%, at least 95%, at least 96%, at least 97%, at least 98%, or at least 99% sequence identity with a fragment of any one of SEQ ID NO: 187, SEQ ID NO: 233-SEQ ID NO: 239, SEQ ID NO: 400-SEQ ID NO: 456, or SEQ ID NO: 241. In some aspects, the cellular receptor-binding peptide comprises a sequence that has at least 80%, at least 90%, at least 92%, at least 93%, at least 94%, at least 95%, at least 96%, at least 97%, at least 98%, or at least 99% sequence identity with SEQ ID NO: 187, SEQ ID NO: 235, SEQ ID NO: 236, SEQ ID NO: 238, SEQ ID NO: 239, SEQ ID NO: 400, or SEQ ID NO: 401 or at least 80%, at least 90%, at least 92%, at least 93%, at least 94%, at least 95%, at least 96%, at least 97%, at least 98%, or at least 99% sequence identity with a fragment of SEQ ID NO: 187, SEQ ID NO: 235, SEQ ID NO: 236, SEQ ID NO: 238, SEQ ID NO: 239, SEQ ID NO: 400, or SEQ ID NO: 401. In some aspects, the cellular receptor-binding peptide comprises a sequence of SEQ ID NO: 187, SEQ ID NO: 235, SEQ ID NO: 236, SEQ ID NO: 238, SEQ ID NO: 239, SEQ ID NO: 400, or SEQ ID NO: 401. In some aspects, the fragment comprises at least 15, at least 16, at least 17, at least 18, at least 19, at least 20, at least 21, at least 22, at least 23, at least 24, at least 25, at least 26, at least 27, at least 28, at least 29, at least 30, at least 31, at least 32, at least 33, at least 34, at least 35, at least 36, at least 37, at least 38, at least 39, at least 40, at least 41, at least 42, at least 43, at least 44, at least 45, at least 46, at least 47, at least 48, at least 49, or at least 50 amino acid residues.

[0016] In some aspects, the cellular receptor-binding peptide comprises one or more histidine residues at a cellular receptor-binding interface. In some aspects, the target-binding peptide comprises one or more histidine residues at a target-binding interface. In some aspects, the target-binding peptide is a PD-L1-binding peptide, an EGFR-binding peptide, or a TNFα-binding peptide. In some aspects, the PD-L1-binding peptide comprises a sequence that has at least 80%, at least 90%, at least 92%, at least 93%, at least 94%, at least 95%, at least 96%, at least 97%, at least 98%, or at least 99% sequence identity with any one of SEQ ID NO: 233, SEQ ID NO: 234, SEQ ID NO: 187, SEQ ID NO: 235-SEQ ID NO: 239, SEQ ID NO: 400-SEQ ID NO: 456, or SEQ ID NO: 240. In some aspects, the EGFR-binding peptide binds EGFR variant III or tyrosine kinase inhibitor-resistant EGFR. In some aspects, the EGFR-binding peptide comprises a sequence that has at least 80%, at least 90%, at least 92%, at least 93%, at least 94%, at least 95%, at least 96%, at least 97%, at least 98%, or at least 99% sequence identity with SEQ ID NO: 243, SEQ ID NO: 244, SEQ ID NO: 219, or SEQ ID NO: 242. In some aspects, the EGFR-binding peptide comprises a sequence of SEQ ID NO: 242. In some aspects, the EGFR-binding peptide comprises a sequence of SEQ ID NO: 243.

[0017] In some aspects, the target is a cell surface molecule, a growth factor receptor, secreted peptide, a secreted protein, a circulated molecule, a cell signaling molecule, an extracellular matrix macromolecule, a neurotransmitter, a cytokine, a growth factor, a tumor associated antigen, a tumor specific antigen or a hormone, a checkpoint inhibitor, an immune checkpoint inhibitor, an inhibitory immune receptor, a ligand of an inhibitory immune receptor, a macrophage surface protein, a lipopolysaccharide, an antibody, an inhibitory immune receptor, a tumor associated antigen, a tumor specific antigen, or an autoantibody. In some aspects, the target is collagen, elastin, a microfibrillar protein, a proteoglycan, CD200R, CD300a, CD300f, CEACAM1, FcgRiib, ILT-2, ILT-3, ILT-4, ILT-5, LAIR-1, PECAM-1, PILR-alpha, SIRL-1, and SIRP-alpha, CLEC4A, Ly49Q, MIC, CD3, CD47, CD28, CD137, CD89, CD14, CD16, CD29, CD44, CD71, CD73, CD90, CD105, CD166, CD27, CD39, CD24, CD25, CD74, CD40L, MUC1, MUC16, MUC2, MUC5AC, MUC4, OX40, 4-1BB, HLA-G, LAG3, Tim3, TIGIT, GITR, TCR, TNF-α, EGFR, EGFRvIII, TKI-resistant EGFR, HER2, ERBB3, PDGFR, FGF, VEGF, VEGFR, IGFR1, CTLA4, STRO1, complement factor C4, complement factor C1q, complement factor C1s, complement factor C1r, complement factor C3, complement factor C3a, complement factor C3b, complement factor C5, complement factor C5a, TGFβ, PCSK9, P2Y6, HER3, RANK, tau, amyloid ß, huntingtin, α-synuclein, glucocerebrosidase, α-glucosidase, IL-1, IL-1R, IL-1α, IL-1β, IL-2, IL-2R, IL-4, IL-5, IL-6, IL-6R, IL-10, IL-10R, IL-17, IL-23, IL-12, p40, a member of the B7 family, c-Met, SIGLEC, MCP-1, an MHC, an MHC I, an MHC II, PD-1, or PD-L1. In some aspects, the target is PD-L1, EGFR, or TNFα.

[0018] In some aspects, the peptide complex comprises a sequence that has at least 80%, at least 90%, at least 92%, at least 93%, at least 94%, at least 95%, at least 96%, at least 97%, at least 98%, or at least 99% sequence identity with any one of SEQ ID NO: 288-SEQ ID NO: 313 or SEQ ID NO: 315-SEQ ID NO: 346; or at least 80%, at least 90%, at least 92%, at least 93%, at least 94%, at least 95%, at least 96%, at least 97%, at least 98%, or at least 99% sequence identity with any one of SEQ ID NO: 347, SEQ ID NO: 348, SEQ ID NO: 351, SEQ ID NO: 352, SEQ ID NO: 355, SEQ ID NO: 356, SEQ ID NO: 358, SEQ ID NO: 359, SEQ ID NO: 360, SEQ ID NO: 361, SEQ ID NO: 362, SEQ ID NO: 363, SEQ ID NO: 364, SEQ ID NO: 365, SEQ ID NO: 371, SEQ ID NO: 373, SEQ ID NO: 376, SEQ ID NO: 378, SEQ ID NO: 382, SEQ ID NO: 384, SEQ ID NO: 387, or SEQ ID NO: 389. In some aspects, the peptide complex comprises a sequence of: SEQ ID NO: 288, SEQ ID NO: 289, SEQ ID NO: 307, SEQ ID NO: 313, SEQ ID NO: 327, SEQ ID NO: 328, SEQ ID NO: 332, SEQ ID NO: 333, SEQ ID NO: 337, SEQ ID NO: 338, SEQ ID NO: 342, or SEQ ID NO: 343; SEQ ID NO: 292, SEQ ID NO: 293, SEQ ID NO: 310, SEQ ID NO: 315, or SEQ ID NO: 316 heterodimerized with SEQ ID NO: 302, SEQ ID NO: 305, SEQ ID NO: 339, SEQ ID NO: 340, SEQ ID NO: 344, or SEQ ID NO: 345; SEQ ID NO: 296 heterodimerized with SEQ ID NO: 302, SEQ ID NO: 339, or SEQ ID NO: 344; SEQ ID NO: 298; SEQ ID NO: 299 heterodimerized with SEQ ID NO: 301; SEQ ID NO: 331 or SEQ ID NO: 336 heterodimerized with SEQ ID NO: 330 or SEQ ID NO: 335; or SEQ ID NO: 292, SEQ ID NO: 315, or SEQ ID NO: 316 heterodimerized with SEQ ID NO: 329, SEQ ID NO: 330, SEQ ID NO: 334, or SEQ ID NO: 335. In some aspects, the peptide complex comprises a sequence of: SEQ ID NO: 290, SEQ ID NO: 291, SEQ ID NO: 308, SEQ ID NO: 317, SEQ ID NO: 318, SEQ ID NO: 322, or SEQ ID NO: 323; SEQ ID NO: 292, SEQ ID NO: 294, SEQ ID NO: 315, SEQ ID NO: 316, heterodimerized with SEQ ID NO: 304, SEQ ID NO: 306, SEQ ID NO: 319, SEQ ID NO: 320, SEQ ID NO: 321, SEQ ID NO: 324, or SEQ ID NO: 325; SEQ ID NO: 295 or SEQ ID NO: 297, heterodimerized with SEQ ID NO: 304, SEQ ID NO: 319, SEQ ID NO: 321, or SEQ ID NO: 324; SEQ ID NO: 298 or SEQ ID NO: 300, heterodimerized with SEQ ID NO: 303; or SEQ ID NO: 326, heterodimerized with SEQ ID NO: 306, SEQ ID NO: 311, SEQ ID NO: 320 or SEQ ID NO: 325.

[0019] In some aspects, an off rate of the cellular receptor-binding peptide from the cellular receptor is slower than a recycling rate of the cellular receptor. In some aspects, an off rate of the cellular receptor-binding peptide from the cellular receptor is no faster than 1 minute, no faster than 2 minutes, no faster than 3 minutes, no faster than 4 minutes, no faster than 5 minutes, no faster than 7 minutes, no faster than 10 minutes, no faster than 15 minutes, or no faster than 20 minutes. In some aspects, the peptide complex is capable of being endocytosed via receptor-mediated endocytosis. In some aspects, the receptor-mediated endocytosis is transferrin receptor-mediated endocytosis. In some aspects, the cellular receptor-binding peptide remains bound to the cellular receptor inside an endocytic vesicle. In some aspects, the peptide complex is recycled when the cellular receptor-binding peptide is bound to the cellular receptor and the cellular receptor is recycled. In some aspects, the target is released or dissociated from the target-binding peptide when the peptide complex is endocytosed via receptor-mediated endocytosis.

[0020] In some aspects, the target is an extracellular protein, a circulating protein, or a soluble protein. In some aspects, the target is a cell surface protein. In some aspects, the target is a transmembrane protein. In some aspects, the peptide complex further comprises a second target-binding peptide. In some aspects, the second target-binding peptide binds a second target. In some aspects, the target and the second target form a dimer when bound to the target-binding peptide and the second target binding peptide. In some aspects, dimerization of the target and the second target increases a rate of endocytosis of the target and the second target. In some aspects, the second target is the same as the target.

[0021] In some aspects, the peptide complex further comprises a half-life modifying agent coupled to the cellular receptor-binding peptide, the target-binding peptide, or both. In some aspects, the half-life modifying agent is a polymer, a polyethylene glycol (PEG), a hydroxyethyl starch, polyvinyl alcohol, a water soluble polymer, a zwitterionic water soluble polymer, a water soluble poly(amino acid), a water soluble polymer of proline, alanine and serine, a water soluble polymer containing glycine, glutamic acid, and serine, an Fc region, a fatty acid, palmitic acid, or a molecule that binds to albumin. In some aspects, the molecule that binds to albumin is a serum albumin-binding peptide. In some aspects, the serum albumin-binding peptide comprises a sequence of any one of SEQ ID NO: 178, SEQ ID NO: 179, or SEQ ID NO: 193. In some aspects, the cellular receptor-binding peptide, the target-binding peptide, or both is recombinantly expressed.

[0022] In some aspects, the target-binding peptide is configured to dissociate from the target at pH 6.5, pH 6.0, pH 5.5, pH 5.0, or pH 4.5. In some aspects, the cellular receptor-binding peptide is configured to dissociate from the cellular receptor at pH 6.5, pH 6.0, pH 5.5, pH 5.0, or pH 4.5.

[0023] In various aspects, the present disclosure provides a method of selectively depleting a target molecule, the method comprising: contacting a peptide complex comprising a cellular receptor-binding peptide a target-binding peptide complexed with the cellular receptor-binding peptide to a cell expressing a cellular receptor; binding the target-binding peptide to the target molecule under extracellular conditions; binding the cellular receptor-binding peptide to the cellular receptor under extracellular conditions; endocytosing the peptide complex, the target molecule, and the cellular receptor; unbinding the target-binding peptide from the target molecule, the cellular-receptor-binding peptide from the cellular receptor, or both under endosomal conditions; and degrading the target molecule, thereby depleting the target molecule.

[0024] In various aspects, the present disclosure provides a method of selectively depleting a target molecule, the method comprising: contacting a peptide complex as described herein to a cell expressing a cellular receptor; binding the target-binding peptide to the target molecule under extracellular conditions; binding the cellular receptor-binding peptide to the cellular receptor under extracellular conditions; endocytosing the peptide complex, the target molecule, and the cellular receptor into an endocytic or lysosomal compartment; releasing the target-binding peptide from the target molecule, the cellular-receptor-binding peptide from the cellular receptor, or both under endosomal conditions; and degrading the target molecule, thereby depleting the target molecule.

[0025] In some aspects, the method further comprises recycling the peptide complex and the cellular receptor. In some aspects, the cellular receptor is a transferrin receptor or PD-L1 and the cellular receptor-binding peptide is a transferrin receptor-binding peptide or a PD-L1-binding peptide. In some aspects, the cellular receptor-binding peptide is a transferrin receptor-binding peptide and the cellular receptor is a transferrin receptor. In some aspects, the cellular receptor-binding peptide is a PD-L1-binding peptide and the cellular receptor is PD-L1. In some aspects, the endocytosing comprises receptor-mediated endocytosis. In some aspects, the cellular receptor-binding peptide remains bound to the cellular receptor in the endocytic or lysosomal compartment. In some aspects, the target molecule is degraded in the endocytic or lysosomal compartment. In some aspects, the receptor-mediated endocytosis is transferrin receptor-mediated endocytosis.

[0026] In some aspects, the target molecule is an extracellular protein, a circulating protein, or a soluble protein. In some aspects, the target molecule is a cell surface protein. In some aspects, the target molecule is a transmembrane protein. In some aspects, the method comprises penetrating a cellular layer comprising a blood brain barrier (BBB) with the peptide complex. In some aspects, the target molecule is degraded in the central nervous system. In some aspects, the cell expresses the cellular receptor.

[0027] In some aspects, the method comprises binding the cellular receptor-binding peptide to the cellular receptor with a dissociation constant (KD) of no more than 50 μM, no more than 5 μM, no more than 500 nM, no more than 100 nM, no more than 40 nM, no more than 30 nM, no more than 20 nM, no more than 10 nM, no more than 5 nM, no more than 2 nM, no more than 1 nM, no more than 0.5 nM, no more than 0.4 nM, no more than 0.3 nM, no more than 0.2 nM, or no more than 0.1 nM under the extracellular conditions. In some aspects, the method comprises binding the cellular receptor-binding peptide to the cellular receptor with a dissociation constant (KD) of no more than 50 μM, no more than 5 μM, no more than 500 nM, no more than 100 nM, no more than 40 nM, no more than 30 nM, no more than 20 nM, no more than 10 nM, no more than 5 nM, no more than 2 nM, no more than 1 nM, no more than 0.5 nM, no more than 0.4 nM, no more than 0.3 nM, no more than 0.2 nM, or no more than 0.1 nM under the endosomal conditions.

[0028] In some aspects, the target-binding peptide remains bound to the target molecule in the endocytic compartment. In some aspects, the method comprises binding the target-binding peptide to the target molecule with a dissociation constant (KD) of no more than 50 μM, no more than 5 μM, no more than 500 nM, no more than 100 nM, no more than 40 nM, no more than 30 nM, no more than 20 nM, no more than 10 nM, no more than 5 nM, no more than 2 nM, no more than 1 nM, no more than 0.5 nM, no more than 0.4 nM, no more than 0.3 nM, no more than 0.2 nM, or no more than 0.1 nM under the extracellular conditions. In some aspects, the method comprises binding the target-binding peptide to the target molecule with a dissociation constant (KD) of no less than 1 nM, no less than 2 nM, no less than 5 nM, no less than 10 nM, no less than 20 nM, no less than 50 nM, no less than 100 nM, no less than 200 nM, or no less than 500 nM under the endosomal conditions. In some aspects, the method comprises binding the cellular receptor-binding peptide to the cellular receptor with an affinity that differs by no more than 2-fold, no more than 5-fold, no more than 10-fold, no more than 15-fold, no more than 20-fold, no more than 25-fold, no more than 30-fold, no more than 40-fold, or no more than 50-fold under the extracellular conditions as compared to the endosomal conditions. In some aspects, the method comprises forming one or more polar or charge-charge interactions between the target-binding peptide and the target molecule.

[0029] In some aspects, the cellular receptor binding peptide comprises a sequence that has at least 80%, at least 90%, at least 92%, at least 93%, at least 94%, at least 95%, at least 96%, at least 97%, at least 98%, or at least 99% sequence identity with any one of SEQ ID NO: 96, SEQ ID NO: 65-SEQ ID NO: 95, SEQ ID NO: 97-SEQ ID NO: 128, SEQ ID NO: 220-SEQ ID NO: 222, or SEQ ID NO: 1-SEQ ID NO: 64. In some aspects, the cellular receptor binding peptide comprises a sequence that has at least 80%, at least 90%, at least 92%, at least 93%, at least 94%, at least 95%, at least 96%, at least 97%, at least 98%, or at least 99% sequence identity with SEQ ID NO: 96. In some aspects, the cellular receptor-binding peptide comprises a sequence of SEQ ID NO: 96. In some aspects, the cellular receptor-binding peptide comprises a sequence of any one of SEQ ID NO: 392-SEQ ID NO: 399. In some aspects, the cellular receptor-binding peptide comprises a sequence that has at least 80%, at least 90%, at least 92%, at least 93%, at least 94%, at least 95%, at least 96%, at least 97%, at least 98%, or at least 99% sequence identity with any one of SEQ ID NO: 187, SEQ ID NO: 233-SEQ ID NO: 239, SEQ ID NO: 400-SEQ ID NO: 456, or SEQ ID NO: 241, or at least 80%, at least 90%, at least 92%, at least 93%, at least 94%, at least 95%, at least 96%, at least 97%, at least 98%, or at least 99% sequence identity with a fragment of any one of SEQ ID NO: 187, SEQ ID NO: 233-SEQ ID NO: 239, SEQ ID NO: 400-SEQ ID NO: 456, or SEQ ID NO: 241. In some aspects, the cellular receptor-binding peptide comprises a sequence that has at least 80%, at least 90%, at least 92%, at least 93%, at least 94%, at least 95%, at least 96%, at least 97%, at least 98%, or at least 99% sequence identity with SEQ ID NO: 187, SEQ ID NO: 235, SEQ ID NO: 238, or SEQ ID NO: 239 or at least 80%, at least 90%, at least 92%, at least 93%, at least 94%, at least 95%, at least 96%, at least 97%, at least 98%, or at least 99% sequence identity with a fragment of SEQ ID NO: 187, SEQ ID NO: 235, SEQ ID NO: 238, or SEQ ID NO: 239. In some aspects, the cellular receptor-binding peptide comprises a sequence of SEQ ID NO: 187, SEQ ID NO: 235, SEQ ID NO: 238, or SEQ ID NO: 239.

[0030] In some aspects, the method further comprises binding a second target molecule with a second target-binding peptide. In some aspects, the target molecule and the second target molecule dimerize when bound to the target-binding peptide and the second target-binding peptide. In some aspects, the method comprises increasing a rate of endocytosis of the target molecule and the second target molecule upon dimerization of the target molecule and the second target molecule. In some aspects, the second target molecule is degraded upon endocytosis of the target molecule and the second target molecule. In some aspects, the second target molecule is the same as the target molecule.

[0031] In various aspects, the present disclosure provides a method of treating a disease or condition in a subject, the method comprising: administering to the subject a peptide complex comprising a cellular receptor-binding peptide a target-binding peptide complexed with the cellular receptor-binding peptide; binding the target-binding peptide under extracellular conditions to a target molecule associated with the disease or condition on a cell of the subject expressing the target molecule and a cellular receptor; binding the cellular receptor-binding peptide under extracellular conditions to the cellular receptor on the cell of the subject; endocytosing the peptide complex, the target molecule, and the cellular receptor; unbinding the target-binding peptide from the target molecule, the cellular-receptor-binding peptide from the cellular receptor, or both under endosomal conditions; and degrading the target molecule, thereby treating the disease or condition.

[0032] In various aspects, the present disclosure provides a method of treating a disease or condition in a subject, the method comprising: administering to the subject a peptide complex as described herein; binding the target-binding peptide under extracellular conditions to a target molecule associated with the disease or condition on a cell of the subject expressing the target molecule and a cellular receptor; binding the cellular receptor-binding peptide under extracellular conditions to the cellular receptor on the cell of the subject; endocytosing the peptide complex, the target molecule, and the cellular receptor; unbinding the target-binding peptide from the target molecule, the cellular-receptor-binding peptide from the cellular receptor, or both under endosomal conditions; and degrading the target molecule, thereby treating the disease or condition.

[0033] In some aspects, the target molecule is a cell surface molecule, a growth factor receptor, secreted peptide, a secreted protein, a circulated molecule, a cell signaling molecule, an extracellular matrix macromolecule, a neurotransmitter, a cytokine, a growth factor, a tumor associated antigen, a tumor specific antigen or a hormone, a checkpoint inhibitor, an immune checkpoint inhibitor, an inhibitory immune receptor, a ligand of an inhibitory immune receptor, a macrophage surface protein, a lipopolysaccharide, an antibody, an inhibitory immune receptor, a tumor associated antigen, a tumor specific antigen, or an autoantibody. In some aspects, the target molecule is collagen, elastin, a microfibrillar protein, a proteoglycan, CD200R, CD300a, CD300f, CEACAM1, FcgRiib, ILT-2, ILT-3, ILT-4, ILT-5, LAIR-1, PECAM-1, PILR-alpha, SIRL-1, and SIRP-alpha, CLEC4A, Ly49Q, MIC, CD3, CD47, CD28, CD137, CD89, CD14, CD16, CD29, CD44, CD71, CD73, CD90, CD105, CD166, CD27, CD39, CD24, CD25, CD74, CD40L, MUC1, MUC16, MUC2, MUC5AC, MUC4, OX40, 4-1BB, HLA-G, LAG3, Tim3, TIGIT, GITR, TCR, TNF-α, EGFR, EGFRvIII, TKI-resistant EGFR, HER2, ERBB3, PDGFR, FGF, VEGF, VEGFR, IGFR1, CTLA4, STRO1, complement factor C4, complement factor C1q, complement factor C1s, complement factor C1r, complement factor C3, complement factor C3a, complement factor C3b, complement factor C5, complement factor C5a, TGFβ, PCSK9, P2Y6, HER3, RANK, tau, amyloid ß, huntingtin, α-synuclein, glucocerebrosidase, α-glucosidase, IL-1, IL-1R, IL-1α, IL-1β, IL-2, IL-2R, IL-4, IL-5, IL-6, IL-6R, IL-10, IL-10R, IL-17, IL-23, IL-12, p40, a member of the B7 family, c-Met, SIGLEC, MCP-1, an MHC, an MHC I, an MHC II, PD-1, or PD-L1. In some aspects, the target molecule is a receptor tyrosine kinase. In some aspects, the receptor tyrosine kinase is EGF receptor, ErbB, Insulin receptor, PDGF receptor, VEGF receptor, FGF receptor, CCK receptor, NGF receptor, HGF receptor, Eph receptor, AXL receptor, TIE receptor, RYK receptor, DDR receptor, RET receptor, ROS receptor, LTK receptor, ROR receptor, MuSK receptor, or LMR receptor. In some aspects, the target molecule is a pathogen or a pathogen surface molecule.

[0034] In some aspects, the disease or condition is a cancer, a neurodegenerative disease, a lysosomal storage disease, an inflammatory disease, an autoimmune disease, a neuroinflammatory disease, an immune disease, or pain. In some aspects, the cancer is breast cancer, liver cancer, colon cancer, brain cancer, leukemia, lymphoma, non-Hodgkin lymphoma, myeloma, blood-cell-derived cancer, lung cancer, sarcoma, stomach cancer, a gastrointestinal cancer, glioblastoma, head and neck cancer, non-small-cell lung cancer, squamous non-small cell lung cancer, pancreatic cancer, ovarian cancer, blood cancer, skin cancer, liver cancer, kidney cancer, or colorectal cancer. In some aspects, the cancer is TKI-resistant, cetuximab-resistant, necitumumab-resistant, or panitumumab-resistant. In some aspects, the cancer is an advanced cancer, a metastatic cancer, a metastatic cancer in the central nervous system, metastatic breast cancer, metastatic skin cancer, a refractory cancer, a KRAS wild type cancer, a KRAS mutant cancer, or an exon20 mutant non-small-cell lung cancer. In some aspects, the target molecule is HER2, EGFR, FGFR-1, PD-L1, VEGF, PD-1, CD38, GD2, SLAMF7, CTLA-4, CCR4, CD20, PDGFRα, VEGFR2, CD33, CD30, CD22, CD79B, Nectin-4, or TROP2. In some aspects, the target molecule is EGFR or PD-L1. In some aspects, the method further comprises administering an additional therapy to the subject. In some aspects, the additional therapy comprises radiation, chemotherapy, platinum therapy, or anti-metabolic therapy. In some aspects, the additional therapy comprises fluorouracil, FOLFIRI, irinotecan, FOLFOX, gemcitabine, or cisplatin.

[0035] In some aspects, the neurodegenerative disease is Alzheimer's disease, amyotrophic lateral sclerosis, Friedreich's ataxia, Huntington's disease, Parkinson's disease, or spinal muscular atrophy. In some aspects, the target molecule is tau, amyloid ß, huntingtin, or α-synuclein. In some aspects, the lysosomal storage disease is Gaucher's Disease or Pompe Disease. In some aspects, the target molecule is glucocerebrosidase or α-glucosidase. In some aspects, the inflammatory disease is rheumatoid arthritis, psoriasis, multiple sclerosis, glomerulonephritis, lupus, inflammatory bowel disease, ulcerative colitis, Crohn's disease, cutaneous vasculitis, neuroinflammatory disease, inflammation-associated neurodegeneration, Alzheimer's disease, stroke, traumatic brain injury, Sjogren's disease, or cystic fibrosis. In some aspects, the target molecule is apolipoprotein E4, TNF-α, IL-1, IL-6, IL-7, IL-12, or IL-23. In some aspects, the target molecule is TNF-α. In some aspects, the cell is a cancer cell, an immune cell, a central nervous system cell, a neuronal cell, a T cell, a B cell, a macrophage, a monocyte, a neutrophil, a dendritic cell, a mast cell, a basophil, or an eosinophil.

[0036] In some aspects, the method further comprises forming a ternary complex between the selective depletion complex, the target molecule, and the cellular receptor. In some aspects, formation of the ternary complex increases recycling or turnover of the cellular receptor, the target molecule, or both. In some aspects, formation of the ternary complex increases binding of the target molecule to the cellular receptor.

### INCORPORATION BY REFERENCE

[0037] All publications, patents, and patent applications cited in this specification are herein incorporated by reference to the same extent as if each individual publication, patent, or patent application was specifically and individually indicated to be incorporated by reference.

### BRIEF DESCRIPTION OF THE DRAWINGS

[0038] The novel features of the invention are set forth with particularity in the appended claims. A better understanding of the features and advantages of the present invention will be obtained by reference to the following detailed description that sets forth illustrative embodiments, in which the principles of the invention are utilized, and the accompanying drawings of which:

[0039] FIG. 1A-FIG. 1G illustrate a Coomassie stained gel of human soluble transferrin receptor (hTfR) ectodomain protein and flow cytometry plots showing successive enrichment of cells that bind to hTfR ectodomain from a pooled, highly diverse peptide library.

[0040] FIG. 1A illustrates a Coomassie stained gel of transferrin receptor (TfR) protein showing successful purification of TfR.

[0041] FIG. 1B illustrates a flow cytometry plot of cells displaying candidate TfR-binding peptides after one flow sort. Cells were sorted based on ability to bind to TfR labeled with a fluorescent streptavidin. Data points in the upper right region represent cells expressing a candidate peptide, quantified by GFP fluorescence, that bind TfR, quantified by fluorescence of the fluorescent TfR-streptavidin.

[0042] FIG. 1C illustrates a negative control flow cytometry plot of cells displaying candidate TfR-binding peptides after one flow sort. Cells were stained based on ability to bind to a control protein labeled with a fluorescent streptavidin. Data points in the upper right region represent cells expressing a candidate peptide, quantified by GFP fluorescence, that bind to the negative control protein, quantified by fluorescence of the fluorescent control protein-streptavidin.

[0043] FIG. 1D illustrates a flow cytometry plot of cells displaying candidate TfR-binding peptides after a second flow sort, following the first cell sort illustrated in FIG. 1B. Cells were sorted based on ability to bind to TfR labeled with a fluorescent streptavidin. Data points in the upper right region represent cells expressing a candidate peptide, quantified by GFP fluorescence, that bind TfR, quantified by fluorescence of the fluorescent TfR-streptavidin.

[0044] FIG. 1E illustrates a negative control flow cytometry plot of cells displaying candidate TfR-binding peptides after a second flow sort, following the first cell sort illustrated in FIG. 1B and FIG. 1C. Cells were stained based on ability to bind to a control protein labeled with a fluorescent streptavidin. Data points in the upper right region represent cells expressing a candidate peptide, quantified by GFP fluorescence, that bind to the negative control protein, quantified by fluorescence of the fluorescent control protein-streptavidin.

[0045] FIG. 1F illustrates a flow cytometry plot of cells displaying candidate TfR-binding peptides after a third flow sort, following the second cell sort illustrated in FIG. 1D. Cells were sorted based on ability to bind to TfR labeled with a fluorescent streptavidin. Data points in the upper right region represent cells expressing a candidate peptide, quantified by GFP fluorescence, that bind TfR, quantified by fluorescence of the fluorescent TfR-streptavidin. The box indicates cells expressing peptides that bind to TfR.

[0046] FIG. 1G illustrates a negative control flow cytometry plot of cells displaying candidate TfR-binding peptides after a third flow sort, following the second cell sort illustrated in FIG. 1D and FIG. 1E. Cells were stained based on ability to bind to a control protein labeled with a fluorescent streptavidin. Data points in the upper right region represent cells expressing a candidate peptide, quantified by GFP fluorescence, that bind to the negative control protein, quantified by fluorescence of the fluorescent control protein-streptavidin. The box indicates cells expressing peptides that bind to the negative control protein.

[0047] FIG. 2A-FIG. 2D illustrate flow cytometry of cells displaying a single clonal TfR-binding peptide and screened for binding to either TfR or a negative control protein to confirm binding of the TfR-binding peptide identified in FIG. 1A-FIG. 1G to TfR. Flow cytometry was performed using TfR or the control protein labeled with either streptavidin or an anti-His antibody to verify that binding was not dependent on the streptavidin label.

[0048] FIG. 2A illustrates a negative control flow cytometry plot of cells expressing a TfR-binding peptide of SEQ ID NO: 1 (x-axis, GFP) screened for binding to a negative control protein labeled (y-axis, stained with a fluorescent anti-His antibody).

[0049] FIG. 2B illustrates a flow cytometry plot of cells expressing a TfR-binding peptide of SEQ ID NO: 1 (x-axis, GFP) screened for binding to TfR (y-axis, stained with a fluorescent anti-His antibody). The box indicates cells that express the TfR-binding peptide and bind to TfR.

[0050] FIG. 2C illustrates a negative control flow cytometry plot of cells expressing a TfR-binding peptide of SEQ ID NO: 1 (x-axis, GFP) screened for binding to a negative control protein labeled (y-axis, stained with a fluorescent streptavidin).

[0051] FIG. 2D illustrates a flow cytometry plot of cells expressing a TfR-binding peptide of SEQ ID NO: 1 (x-axis, GFP) screened for binding to TfR (y-axis, stained with a fluorescent streptavidin). The box indicates cells that express the TfR-binding peptide and bind to TfR.

[0052] FIG. 3A and FIG. 3B illustrate TfR-binding for peptide variants arising from permuting enriched variants from site-saturation mutagenesis (SSM). Each graph represents a round of completed SSM and each shaded bar within the applicable graph indicates the number of mutations in the specific variant peptide denoted under the bar as compared to the respective reference peptide sequence with which the round of SSM was started (SEQ ID NO: 1 in FIG. 3A, or SEQ ID NO: 2 in FIG. 3B). The data show the relative binding affinity of the identified peptides to TfR, representing the last step of SSM employed showing the next generation molecules.

[0053] FIG. 3A illustrates the level of hTfR binding for variants comprising sequences of SEQ ID NO: 3-SEQ ID NO: 23, derived from a site-saturation mutagenesis (SSM) for affinity maturation of the peptide having a sequence of SEQ ID NO: 1.

[0054] FIG. 3B illustrates the level of hTfR binding for peptide variants having sequences of SEQ ID NO: 24-SEQ ID NO: 28 and SEQ ID NO: 30-SEQ ID NO: 32, derived from a site-saturation mutagenesis (SSM) for affinity maturation of the starting peptide having a sequence of SEQ ID NO: 2.

[0055] FIG. 4 illustrates surface plasmon resonance (SPR) curves showing binding of TfR-binding peptide variants with different affinities to TfR. Dissociation kinetics were quantified for each peptide variant. The surface plasmon resonance (SPR) trace over time is shown using 300 nM of each of SEQ ID NO: 1, SEQ ID NO: 2, SEQ ID NO: 4, and SEQ ID NO: 32 to hTfR. SEQ ID NO: 32 show the strongest binding to TfR, as evaluated by SPR. Data was normalized to the maximum response of each trace.

[0056] FIG. 5 illustrates a surface plasmon resonance (SPR) trace showing hTfR-binding for varying concentrations of the peptide having a sequence of SEQ ID NO: 2. Based on this data, the dissociation constant (K_{D}) of the peptide of SEQ ID NO: 2 was determined to be 8.7 nM.

[0057] FIG. 6 illustrates a surface plasmon resonance (SPR) trace showing hTfR-binding for varying concentrations of the peptide having a sequence of SEQ ID NO: 4. Based on this data, the dissociation constant (K_{D}) of the peptide of SEQ ID NO: 4 was determined to be 14.8 nM.

[0058] FIG. 7 illustrates binding and single cycle kinetics data of SEQ ID NO: 32 binding to captured biotinylated hTfR by surface plasmon resonance (SPR). 5 concentrations of a peptide having a sequence of SEQ ID NO: 32 (0.037 nM, 0.11 nM, 0.33 nM, 1 nM, 3 nM) were injected over 2 densities of captured biotinylated (Bt)-hTfR and analyzed globally. Analysis parameters were held constant for high and low density runs, and data from both channels was included in the same analysis. Based on this data, the dissociation constant (K_{D}) of the peptide of SEQ ID NO: 32 was determined to be 216 μM, the association rate (kₐ) was determined to be 8.55×10⁶ M⁻¹s⁻¹, and the dissociation rate (k_{d}) was determined to be 1.85×10⁻³ s⁻¹.

[0059] FIG. 8 illustrates binding and single cycle kinetics data of SEQ ID NO: 30 binding to captured biotinylated hTfR by SPR. 5 concentrations of a peptide having a sequence of SEQ ID NO: 30 (0.037 nM, 0.11 nM, 0.33 nM, 1 nM, 3 nM) were injected over 2 densities of captured Bt-hTfR and analyzed globally. Analysis parameters were held constant for high and low density runs, and data from both channels was included in the same analysis. Based on this data, the dissociation constant (K_{D}) of the peptide of SEQ ID NO: 30 was determined to be 486 μM, the association rate (kₐ) was determined to be 8.57×10⁶ M⁻¹s⁻¹, and the dissociation rate (k_{d}) was determined to be 4.16×10⁻³ s⁻¹.

[0060] FIG. 9A-FIG. 9C illustrate the purification and testing of a soluble transferrin receptor (TfR) ectodomain to assess whether it will bind to transferrin.

[0061] FIG. 9A illustrates a surface plasmon resonance (SPR) trace of holo or apo transferrin (Tf) binding to the purified TfR ectodomain. The data shows that holo Tf binds the TfR ectodomain, but apo Tf does not, as shown by the increase in response (RU) over time for the holo Tf, but not the apo Tf. This data validates that the soluble TfR used in the screen for TfR-Binding CDP peptides comprises the endogenous protein structure of TfR on the surface of the cell providing data that the binders have utility for receptor mediated endocytosis.

[0062] FIG. 9B illustrates a schematic of a vector display scaffold and target engagement used to screen for and optimize peptide binding properties. The surface display vector (SDGF) encoding a GFP-tagged construct of the binder (e.g., SEQ ID NO: 1, SEQ ID NO: 2, or SEQ ID NO: 32) is expressed on the cell surface. A target protein (e.g., TfR) labeled with a fluorescent dye (“Co-Stain”) bind to the surface-expressed binder. Fluorescence intensity of the co-stain is used as a measure of peptide affinity for the target since cells expressing a peptide with a high affinity for the target protein will recruit more co-stained target than cells expressing a peptide with lower affinity for the target protein.

[0063] FIG. 9C illustrates flow cytometry to verify specificity of TfR binding for Machupo virus glycoprotein, a known TfR binding target, as measured by the amount of Alexa Fluor 647-TfR (co-stain in FIG. 9B) bound. Cells transfected with Machupo virus glycoprotein (SDGF-MaCV) are tested with a combination of biotinylated TfR and Alexa Fluor 647-labeled streptavidin (Strep-647), SDGF-MaCV cells and Alexa Fluor 647-labeled elastase, or SDGF-elafin cells and TfR+Strep-647. The elastase and elafin cells conjugates fail to bind cells. These results showed that the soluble TfR used in the peptide screens comprises the endogenous protein structure and demonstrated both the specificity of TfR binding to its endogenous ligand, and the utility of SDGF as a means to identify novel TfR binding partners.

[0064] FIG. 10A-FIG. 10C show data using flow cytometry to identify the binding of a TfR-binding cystine-dense peptide (CDP, SEQ ID NO: 32) fused with GFP to TfR labeled with streptavidin-AlexaFluor647 (strep-647) under pH conditions representing the physiologic extracellular environment (pH 7.4) or the endosomal environment (pH 5.5).

[0065] FIG. 10A illustrates flow cytometry results in a binding assay to measure binding of a TfR-binding cystine-dense peptide (CDP) (SEQ ID NO: 32) to TfR at pH 7.4, representing the physiologic extracellular environment. Cells expressing SEQ ID NO: 32 were stained with 10 nM of TfR and 10 nM Strep-647 at pH 7.4. The box indicates the “slice” gate used in the quantitation shown in FIG. 10C.

[0066] FIG. 10B illustrates flow cytometry results in a binding assay to measure binding of a TfR-binding CDP (SEQ ID NO: 32) to TfR at pH 5.5. Cells expressing SEQ ID NO: 32 were stained with 10 nM of TfR and 10 nM Strep-647 at pH 5.5, representing the endosomal environment. The box indicates the “slice” gate used in the quantitation shown in FIG. 10C.

[0067] FIG. 10C illustrates a comparison of the labeling efficiency of the TfR-binding peptide at pH 7.4 measured in FIG. 10A and the labeling efficiency at pH 5.5 measured in FIG. 10B. The results show that the binding of the TfR-binding cystine-dense peptide (CDP, SEQ ID NO: 32) is robust and comparable both at physiologic extracellular and endosomal conditions.

[0068] FIG. 11A schematically illustrates a workflow for developing compositions for selective depletion of a target molecule. Target-binding peptides are identified by staining an expression library containing target-binding peptide candidates with labeled target molecule. Target-binding peptides from the library are distinguished by accumulation of signal from bound target molecules. Optionally, identified target-binding peptides are selected and further matured for binding, for example using point mutation screens. The identified target-binding peptides are modified for pH-dependent binding, for example by performing histidine point mutation scans as illustrated in FIG. 11D. The resulting pH-dependent target-binding peptides are linked (e.g., as fusion peptides) to a recycler (e.g., a TfR-binding peptide), to form a selective depletion complex.

[0069] FIG. 11B schematically illustrates in vitro validation of the ability of the selective depletion complex to deplete the target, such as from the cell surface or the media.

[0070] FIG. 11C schematically illustrates phenotypic screening of selective depletion complexes. The selective depletion complexes can be validated by testing target depletion in cells expressing the selective depletion complexes. Complexes can be further tested in healthy cells and in transformed cell lines to measure disease-specific functionalities of the selective depletion complexes. Specificity of the complexes can be measured by testing for changes in a target-specific cellular function, such as cancer-specific growth inhibition upon depletion of an apoptosis inhibitor.

[0071] FIG. 11D illustrates an example of a histidine substitution scan to introduce pH-dependent binding affinity into a target-binding peptide. A histidine substitution scan of a PD-L1-binding CDP (SEQ ID NO: 187) is shown. The peptide sequence is provided above and to the side, and each black box represents a first and second site in which His could be substituted. Those falling along the diagonal from the top-left to the bottom-right represent single His substitutions. A peptide library containing the identified histidine-containing peptides may be generated and screened, for example using the workflow shown in FIG. 11A.

[0072] FIG. 12A schematically illustrates a method for selectively depleting a soluble target molecule using a composition comprising a target-binding peptide with pH-dependent binding and a TfR-binding peptide, such as a TfR-binding peptide with pH-independent binding. The composition binds to TfR and to the soluble target molecule and is endocytosed via transferrin receptor-mediated endocytosis. The target molecule is released upon acidification of the endocytic compartment and some or all of the target molecule is degraded in a lysosomal compartment. The TfR and the composition are recycled to the cell surface.

[0073] FIG. 12B schematically illustrates a method for selectively depleting a surface target molecule using a composition comprising a target-binding peptide with pH-dependent binding and a TfR-binding peptide, such as a TfR-binding peptide with pH-independent binding. The composition binds to TfR and to the surface target molecule and is endocytosed via transferrin receptor-mediated endocytosis. The target molecule is released upon acidification of the endocytic compartment and some or all of the target molecule is degraded in a lysosomal compartment. The TfR and the composition are recycled to the cell surface.

[0074] FIG. 13A and FIG. 13B illustrate the production and purity of peptides fused to a serum albumin-binding peptide (SA21).

[0075] FIG. 13A shows production and purity of a TfR-binding peptide fused to a serum albumin-binding peptide (SA21) corresponding to SEQ ID NO: 181. The peptide of SEQ ID NO: 181 was produced as a siderocalin (SCN, SEQ ID NO: 147) fusion, and then cleaved from SCN by TEV. Purity was verified by SDS-PAGE (left) and RP-HPLC (right) under DTT reducing (“R”) or non-reducing (“NR”) conditions. SDS-PAGE was also run on the uncleaved (“U”) siderocalin-CDP fusion peptide. This data indicates that SEQ ID NO: 181 fused to SCN was successfully produced and then cleaved by TEV cleavage, to yield the free CDP fusion of SEQ ID NO: 181.

[0076] FIG. 13B shows production and purity of a peptide fused to SA21 corresponding to SEQ ID NO: 182. The peptide of SEQ ID NO: 182 was produced as a SCN fusion, and then cleaved from SCN by TEV. Purity was verified by SDS-PAGE (left) and RP-HPLC (right) under DTT reducing (“R”) or non-reducing (“NR”) conditions. SDS-PAGE was also run on the uncleaved (“U”) siderocalin-CDP fusion peptide. This data indicates that SEQ ID NO: 182 fused to SCN was successfully produced and then cleaved by TEV cleavage, to yield the free CDP fusion of SEQ ID NO: 182.

[0077] FIG. 14A schematically illustrates a CDP-CDP dimer containing a target-binding CDP linked to a TfR-binding CDP via a double-knot toxin (DkTx) peptide linker (SEQ ID NO: 139, KKYKPYVPVTTN).

[0078] FIG. 14B schematically illustrates a CDP-CDP dimer containing a target-binding CDP linked to a TfR-binding CDP via a poly-GlySer linker (SEQ ID NO: 138, GGGSGGGSGGGS).

[0079] FIG. 14C schematically illustrates a CDP-CDP dimer containing a target-binding CDP linked to a TfR-binding CDP via a human IgG linker with a Cys-to-Ser mutation at position 5 (SEQ ID NO: 140, EPKSSDKTHT).

[0080] FIG. 15 schematically illustrates a TfR-binding peptide non-covalently linked to a target-binding peptide via an Fc bispecific dimer.

[0081] FIG. 16A schematically illustrates a TfR-binding peptide and target-binding peptide fusion containing an albumin binding protein (e.g., SEQ ID NO: 192) in between the target-binding peptide and the TfR-binding peptide and separated by peptide linkers (e.g., any one of SEQ ID NO: 129-SEQ ID NO: 141 or SEQ ID NO: 195-SEQ ID NO: 218).

[0082] FIG. 16B schematically illustrates a TfR-binding peptide and target-binding peptide fusion containing an albumin binding protein (e.g., SEQ ID NO: 192) fused to the target-binding peptide by a peptide linker (e.g., any one of SEQ ID NO: 129-SEQ ID NO: 141 or SEQ ID NO: 195-SEQ ID NO: 218).

[0083] FIG. 16C schematically illustrates a TfR-binding peptide and target-binding peptide fusion containing an albumin binding protein (e.g., SEQ ID NO: 192) fused to the TfR-binding peptide by a peptide linker (e.g., any one of SEQ ID NO: 129-SEQ ID NO: 141 or SEQ ID NO: 195-SEQ ID NO: 218).

[0084] FIG. 17A illustrates SDS-PAGE gels of expressed and TEV-cleaved CDP-CDP dimers containing a TfR-binding peptide (SEQ ID NO: 2) fused to an ion channel inhibitory CDP (Z1E-AnTx, Z1P-AnTx, EWSS-ShK, HsTx, Pro-Vm24, or Vm24) via either a DkTx linker (SEQ ID NO: 139) or a GS3 linker (SEQ ID NO: 141 or SEQ ID NO: 195-SEQ ID NO: 218). The expression product after TEV cleavage contained SCN-CDP dimer, SCN, and CDP dimer. The band for the dimer present on each gel is denoted with a rectangle. This demonstrates that the CDP dimers were successfully expressed and cleaved from SCN. Each gel contained, from left to right, a molecular weight latter (“L”), the peptide sample under non-reducing conditions (“NR”), and the peptide sample under reducing conditions (“R”).

[0085] FIG. 17B illustrates SDS-PAGE (left), RP-HPLC (center), and channel inhibition assays (right) for a TfR-binding peptide (SEQ ID NO: 32, top), a Vm24 ion channel inhibitory peptide (middle), and a CDP-CDP dimer containing the TfR-binding peptide fused to the Vm25 ion channel inhibitory peptide (bottom). “Folded” indicates the sample was analyzed under non-reducing conditions and “unfolded” indicates the sample was analyzed under reducing conditions. This data indicates that a target-binding CDP (here, an ion channel inhibiting CDP) can be dimerized with a TfR-binding peptide (such as SEQ ID NO:32), can be expressed, folded, and purified, and that the target-binding CDP can maintain its target binding function while in the dimer with the TfR-binding CDP (function shown here is ion channel inhibition).

[0086] FIG. 18A-FIG. 18D shows flow staining data illustrating that TfR-binding peptides are cross-reactive with murine TfR (mTfR) in cell surface binding assays. 293F cells expressing either human or mouse TfR from their surface were stained with soluble TfR-binding peptides that were directly labeled with AlexaFluor 647 dye. This shows that TfR-binding peptides bind both human (hTfR, SEQ ID NO: 190) and murine TfR.

[0087] FIG. 18A illustrates the species specificity of the TfR used in these experiments, in this case human TfR. Data is displayed as two topographical density maps and indicates flow cytometry data of transferrin stained with Anti-hTfR (CD71) antibody. The upper density map, oriented diagonally from lower left to upper right, depicts 293ST+SDGF-hTfR. The lower density map, oriented horizontally, depicts 293ST+SDGF-mTfR. The y-axis shows hTfR+Streptavidin from 0 to 10⁷, in increments of 10 on a log scale. The x-axis shows GFP from 0 to 10⁶, in increments of 10 on a log scale.

[0088] FIG. 18B illustrates the species specificity of the TfR used in these experiments, in this case murine TfR. Data is displayed as two topographical density maps and indicates flow cytometry data of transferrin stained with Anti-mTfR (CD71) antibody. The upper density map, oriented diagonally from lower left to upper right, depicts 293ST+SDGF-mTfR. The lower density map, having three lobes, depicts 293ST+SDGF-hTfR. The y-axis shows hTfR+Streptavidin from 10⁴ to 10⁷, in increments of 10 on a log scale. The x-axis shows GFP from 0 to 10⁶, in increments of 10 on a log scale.

[0089] FIG. 18C illustrates quantification of binding of the peptide having a sequence of SEQ ID NO: 1, the peptide having a sequence of SEQ ID NO: 2, the peptide having a sequence of SEQ ID NO: 30, and the peptide having a sequence of SEQ ID NO: 32 to human TfR. Data is displayed as four topographical density maps and indicates flow cytometry data using 293ST cells+SDGF-hTFR. Three density maps appear nearly superimposed and are oriented above a fourth density map. The lower density map is oriented horizontally and depicts SEQ ID NO: 1 (1^{st} gen). The upper three density maps are oriented diagonally from lower left to upper right. The density map slightly above the other two corresponds to SEQ ID NO: 32 (3^{rd} gen). The density map slightly below the other two corresponds to SEQ ID NO: 2 (2^{nd} gen). The third density map corresponds to SEQ ID NO: 30 (3^{rd} gen). This data illustrates that the peptide having a sequence of SEQ ID NO: 1, the peptide having a sequence of SEQ ID NO: 2, the peptide having a sequence of SEQ ID NO: 30, and the peptide having a sequence of SEQ ID NO: 32 bind human TfR, while the peptide having a sequence of SEQ ID NO: 1 has weaker binding relative to the other three peptides tested. The y-axis shows hTfR+Streptavidin from 0 to 10⁷, in increments of 10 on a log scale. The x-axis shows GFP from 0 to 10⁶, in increments of 10 on a log scale.

[0090] FIG. 18D illustrates quantification of binding of the peptide having a sequence of SEQ ID NO: 1, the peptide having a sequence of SEQ ID NO: 2, the peptide having a sequence of SEQ ID NO: 30, and the peptide having a sequence of SEQ ID NO: 32 to murine TfR. Data is displayed as four topographical density maps and indicates flow cytometry data using 293ST cells+SDGF-mTFR. Three density maps appear nearly superimposed and are oriented above a fourth density map. The lower density map is oriented horizontally and depicts SEQ ID NO: 1 (1^{st} gen). The upper three density maps are oriented diagonally from lower left to upper right. The density map slightly above the other two corresponds to SEQ ID NO: 32 (3^{rd} gen). The density map slightly below the other two corresponds to SEQ ID NO: 2 (2^{nd} gen). The third density map corresponds to SEQ ID NO: 30 (3^{rd} gen). This data illustrates that the peptide having a sequence of SEQ ID NO: 2, the peptide having a sequence of SEQ ID NO: 30, and the peptide having a sequence of SEQ ID NO: 32 bind murine TfR, whereas the peptide having a sequence of SEQ ID NO: 1 did not demonstrate binding to mTfR under the conditions tested. The y-axis shows hTfR+Streptavidin from 0 to 10⁷, in increments of 10 on a log scale. The x-axis shows GFP from 0 to 10⁶, in increments of 10 on a log scale.

[0091] FIG. 19A and FIG. 19B illustrate CDP-NT peptide complexes which induce an IP₁ response downstream of the neurotensin receptor (NTSR) both in CRE-Luciferase (CRE-Luc) mice and in mammalian cells.

[0092] FIG. 19A illustrates the relevant pathways influencing CRE-driven luciferase in the CRE-Luc mice. PLC denotes phospholipase C. AC denotes adenylyl cyclase. CaMK denotes calmodulin-dependent protein kinase. CREB denotes the cAMP response element binding protein. PKA denotes protein kinase A. PDE denotes cAMP phosphodiesterase. FS denotes forskolin. Rol denotes rolipram. GPCR denotes a G-protein-coupled receptor.

[0093] FIG. 19B shows FRET data illustrating in vitro neurotensin (NT) receptor engagement showing IP₁ accumulation only in response to NT or NT peptide complexes in HEK-293 cells expressing NTSR1. IP₁ is measured using an assay kit (CisBio 62IPAPEB) with a readout of FRET ratio. N=3 wells for all except vehicle, which had N=36. Horizontal bar indicates sample mean. mTF=murine transferrin. Baseline HEK293=mean assay value for HEK293 cells (N=36 wells) that do not express NTSR1, included as a reference.

[0094] FIG. 20A schematically illustrates mechanisms of resistance to tyrosine kinase inhibitors (TKIs) or anti-EGFR antibody therapies (e.g., cetuximab) in EGFR-driven cancer cells. EGFR-driven cancer cells with normal EGFR (panel 1) are sensitive to both anti-EGFR antibodies and tyrosine kinase inhibitors, resulting in reduced downstream KRAS and MEK signaling in response to either treatment (indicated by gray dashed arrows). Mutations in EGFR that prevent TKI binding (panel 2) are resistant to TKIs, showing little or no change in downstream signaling in response to TKI treatment (indicated by solid black arrows); TKI-resistant EGFR-driven cancer cells may still be sensitive to anti-EGFR antibodies. Heterodimerization with and cross-activation by other related growth factor receptors (e.g., HER2, ERBB3, or MET) render EGFR-driven cancer cells in which the dimerization partner is overexpressed (panel 3) insensitive to one or both of anti-EGFR antibodies and TKIs. EGFR-driven cancer cells in which EGFR is constitutively active (panel 4), such as EGFR variant III (EGFRvIII), are insensitive to anti-EGFR antibodies that prevent dimerization-driven activation of EGFR; cells with constitutively active EGFR may still be sensitive to TKIs.

[0095] FIG. 20B schematically illustrates use of selective depletion complexes (SDCs) to overcome resistance mechanisms in EGFR-driven cancer cells. This shows that SDCs can be effective against EGFR-driven cancer, including those cancers or cancer cells with normal EGFR as well as those cancers or cancer cells with resistance to TKI or EGFR antibody therapy. EGFR-driven cancer cells with Normal EGFR (panel 1) in an EGFR-driven cancer cell is effectively depleted by an SDC, resulting in reduced downstream KRAS and MEK signaling (indicated by gray dashed arrows) in response to SDC treatment. Mutated EGFR that prevent TKI binding (panel 2) is effectively depleted by an SDC, resulting in reduced downstream KRAS and MEK signaling in response to SDC treatment. EGFR heterodimerized with and cross-activated by an overexpressed growth factor receptor (e.g., HER2, ERBB3, or MET, panel 3) is effectively depleted by an SDC, resulting in reduced downstream KRAS and MEK signaling in response to SDC treatment. Depletion of the heterodimerized EGFR also has the potential to deplete the heterodimerization partner (e.g., HER2, ERBB3, or MET, panel 3). Constitutively active EGFR (panel 4), such as EGFRvIII, is effectively depleted by an SDC, resulting in reduced downstream KRAS and MEK signaling in response to SDC treatment.

[0096] FIG. 21 shows flow sorting data illustrating enrichment of peptides with pH-dependent binding to PD-L1. This data shows that pH-dependent binding peptides can be generated through flow sorting. A histidine-doped library based on a PD-L1-binding peptide (SEQ ID NO: 187), prepared as described in FIG. 11D, was screened for peptides that exhibited stronger PD-L1 binding at neutral pH (7.4) and weaker binding at acidic pH (5.5). The input library was initially screened for high PD-L1 binding at pH 7.4. The second and third rounds of screening (“Sort 1” and “Sort 2,” respectively) were performed at pH 5.5 to mimic endosomal pH, enriching for poor PD-L1 binding at this pH. The final round of screening (“Sort 3”) was performed at pH 7.4. Differential binding at pH 7.4 and pH 5.5 was observed following screening (“Sort 4”). The areas encompassed by the 5-sided polygon in each graph denotes the population that was selected during sorting. Darker topographical density maps indicate staining with PD-L1 under pH 7.4 conditions and lighter topographical density maps indicate staining with PD-L1 under pH 5.5 conditions.

[0097] FIG. 22 shows binding data at pH 7.4 (left bars) and at pH 5.5 (right bars) for pH-dependent PD-L1-binding peptide variants identified in FIG. 21. Variants of SEQ ID NO: 187 with E2H, M13H, and K16H substitutions, individually and in combination, were screened for pH-dependent binding to PD-L1. Peptide variants containing substitutions at E2H (SEQ ID NO: 234), M13H (SEQ ID NO: 235), K16H (SEQ ID NO: 236), E2H and M13H (SEQ ID NO: 237), E2H and K16H (SEQ ID NO: 233), M13H and K16H (SEQ ID NO: 238), or E2H, M13H, and K16H (SEQ ID NO: 239) exhibited varying degrees of pH-dependent binding to PD-L1. “UTF” indicates untransfected cells (negative control). The parent peptide (SEQ ID NO: 187) exhibited some degree of pH-dependent binding to PD-L1. Some variants of SEQ ID NO: 187 exhibited more pH-dependence in PD-L1 binding than the parent, while some variants of SEQ ID NO: 187 exhibited less pH-dependence in PD-L1 binding than the parent. The peptide of SEQ ID NO: 234 was shown to have a high difference in binding at pH 7.4 versus pH 5.5, demonstrating higher binding at pH 7.4 than at pH 5.5. The peptide of SEQ ID NO: 233 (black arrow) is shown to have a particularly high difference in binding at pH 7.4 versus pH 5.5, also demonstrating higher binding at pH 7.4 than at pH 5.5. This data illustrates the generation of peptides that bind PD-L1 at higher levels at pH 7.4 and at lower levels at pH 5.5.

[0098] FIG. 23A schematically illustrates the domain configuration of selective depletion complexes, such as those utilized in assays shown in FIG. 23B and FIG. 23C. Selective depletion complexes contained, from N-terminus to C-terminus, a target-binding peptide, a first peptide linker (GGGGS×4, SEQ ID NO: 224), an albumin binding peptide (SEQ ID NO: 227), a second peptide linker (GGGGS×4, SEQ ID NO: 224), and a TfR-binding peptide.

[0099] FIG. 23B shows an SDS-PAGE gel of two purified selective depletion complexes arranged as illustrated in FIG. 23A, and two negative controls complexes where the TfR-binding peptide is replaced with a peptide that does not bind TfR. Peptide 1 (SEQ ID NO: 367) contained a target-binding peptide that binds EGFR (SEQ ID NO: 244) and a peptide that does not significantly bind TfR corresponding to SEQ ID NO: 232. Peptide 2 (SEQ ID NO: 328) contained a target-binding peptide that binds EGFR (SEQ ID NO: 244) and a high affinity TfR-binding peptide corresponding to SEQ ID NO: 96. Peptide 3 (SEQ ID NO: 357) contained a target-binding peptide that binds PD-L1 (SEQ ID NO: 187) and a peptide that does not significantly bind TfR corresponding to SEQ ID NO: 232. Peptide 4 (SEQ ID NO: 356) contained a target-binding peptide that binds PD-L1 (SEQ ID NO: 187) and a high affinity TfR-binding peptide corresponding to SEQ ID NO: 96. This data indicates the production and purity of these peptides.

[0100] FIG. 23C shows ternary complex formation of the four peptide complexes shown in FIG. 23B with cells expressing EGFR (left) or PD-L1 (right). Cells were stained with fluorescently labeled TfR to detect ternary complex formation between a target protein expressed on the cell surface, the peptide complex, and TfR. Peptide 2 (SEQ ID NO: 328), which contained an EGFR-binding peptide and a high affinity TfR-binding peptide, formed ternary complexes with EGFR-expressing cells but not with PD-L1-expressing cells. Peptide 4 (SEQ ID NO: 356), which contained a PD-L1-binding peptide and a high affinity TfR-binding peptide, formed ternary complexes with PD-L1-expressing cells but not with EGFR-expressing cells. Peptides 1 and 3, which did not contain high affinity TfR-binding peptides, did not form ternary complexes. This data indicates that peptides complexes containing a target-binding peptide and a TfR-binding peptide can form ternary complexes on a cell surface with the target and with TfR.

[0101] FIG. 24A schematically illustrates ternary complex formation between a selective depletion complex (SDC, containing a target-binding peptide, a receptor-binding peptide, and a His tag (SEQ ID NO: 228)), a target protein expressed on a cell surface, and a transferrin receptor expressed on a cell surface.

[0102] FIG. 24B shows binding data for peptide complexes with (+) or without (−) a target-binding peptide that binds PD-L1 (SEQ ID NO: 187, “PDL1”) and with or without a receptor-binding peptide that binds TfR (SEQ ID NO: 96, “TfR”) to cells that express TfR with or without expressing PD-L1 (“PDL1”). All peptide complexes contained a His tag (SEQ ID NO: 228). The 1^{st} bar corresponds to PBS negative control, no peptide complex. The 2^{nd} and 3^{rd} bars were measured using a peptide complex of SEQ ID NO: 357. The 4^{th} and 5^{th} bars were measured using a peptide complex of SEQ ID NO: 356 capable of binding both PD-L1 and TfR. A peptide complex that contains both a PD-L1 binding peptide and a TfR-binding peptide can be a selective depletion complex (SDC). Binding was measured using a fluorescent anti-His antibody that bound to the His-tag on the peptide complexes. High levels of binding were observed using an SDC that binds both PD-L1 and TfR on cells that are expressing both PD-L1 and TfR. This data shows that when a cell is expressing both the target and the receptor, an SDC that containing binding peptides to both the target and the receptor will bind to that cell at high levels (5^{th} bar). The data also shows that a peptide complex that binds TfR will bind to a cell that is expressing TfR (4^{th} bar), even though adding a surface target binder increases SDC binding (5^{th} bar), presumably due to cooperative binding. Cooperative binding could possibly also be achieved by using an SDC with two TfR-binding peptides.

[0103] FIG. 25A schematically illustrates examples of monovalent selective depletion complexes containing a single target-binding moiety (EGFR-binding nanobodies or PD-L1-binding CDPs in this example) and a single receptor-binding moiety (TfR-binding CDPs or scFvs in this example). These can be arranged in a single protein, where both moieties are separated by a linker, or as a dimeric complex where one monomer contains a TfR-binding moiety, and another contains a target-binding moiety. Active catalytic molecules are those for which the TfR-binding moiety binds in a pH-independent fashion and the target-binding moiety binds in a pH-dependent fashion. Active non-catalytic molecules are those for which the TfR-binding moiety binds in a pH-dependent fashion and the target-binding moiety binds in a pH-independent fashion. Either active catalytic or active non-catalytic molecules would be expected to cause selective depletion of their target; non-catalytic molecules would travel with the target down the endosomal degradation pathway, while catalytic molecules would follow TfR back to the cell surface to bind another target. Representative control molecules are those where both TfR-binding and target-binding moieties bind in a pH-independent fashion but would not be expected to cause a selective depletion of their target either as effectively or to the same degree as the active catalytic or active non-catalytic molecules, or would not cause selective depletion of the target at all or in a significant manner. Other controls can be used to assess TfR-dependency of the active catalytic or active non-catalytic molecules, and could include comparatively measuring a depletion of a molecule that does not bind TfR, which control would not be expected to cause a selective depletion of their target either as effectively or to the same degree as the active catalytic or active non-catalytic molecules, or would not cause selective depletion of the target at all or in a significant manner.

[0104] FIG. 25B schematically illustrates examples of selective depletion complexes with differing valence for TfR- and/or target-binding. The figure illustrates Fc fusions where the TfR-binding moiety (a pH-independent TfR-binding CDP in this case) may be present once in the molecule (monovalent) or twice in the molecule (bivalent), and the target-binding moiety (a pH-dependent EGFR-binding nanobody in this case) may be present once in the molecule (monovalent) or twice in the molecule (bivalent). Fc fusions in which the two monomers are not identical can be assembled via knob-in-holes (KIH) dimerization. Multivalent selective depletion complexes can also be expressed as a single polypeptide chain (not shown).

[0105] FIG. 26A shows a co-crystal structure of a high-affinity PD-L1-binding CDP (SEQ ID NO: 187, cartoon) binding to or docked with PD-L1 (surface, with lighter shading denoting oxygen and darker shading denoting nitrogen).

[0106] FIG. 26B shows relative binding enrichment, shown as absolute value of average SSM enrichment, of PD-L1-binding CDP variants containing amino acid substitutions in resolved (R) residues or unresolved (UR) residues, as seen in the co-crystal structure of FIG. 26A. Substitutions at resolved residues had a greater impact, either positive or negative, on binding than substitutions at unresolved residues (**: P=0.0055), showing that resolved played a greater role in interactions with PD-L1 than unresolved residues.

[0107] FIG. 26C shows an overlay of PD-1 (mesh) with SEQ ID NO: 187 (cartoon) at the binding interface with PD-L1 (surface, with lighter shading denoting oxygen and darker shading denoting nitrogen). The PD-1 binding site overlaps with SEQ ID NO: 187, showing that SEQ ID NO: 187 would be expected to compete with PD-1 for binding to PD-L1.

[0108] FIG. 26D shows a zoomed in view of the SEQ ID NO: 187 PD-L1 co-crystal structure of FIG. 26A from two different angles. Residues of SEQ ID NO: 187 that interact with PD-L1, including K5, V9, W12, M13, K16, V39, F40, L43, and D44, are shown as sticks. Residues of PD-L1 that interact with SEQ ID NO: 187, including Y56, Q66, R113, M115, A121, and Y123, are also labeled.

[0109] FIG. 26E shows isolated side chains of select residues in SEQ ID NO: 187 (gray) at the PD-L1-binding interface relative the parent CDP (black, minimally clashing rotamers). Labeled residues of SEQ ID NO: 187, including M13, V39, F40, and L43, correspond to substitutions relative to parent CDP that improved binding to PD-L1.

[0110] FIG. 26F shows a zoomed in view of the binding interface between SEQ ID NO: 187 (cartoon) and PD-L1 (surface). The PD-L1 surface is color-coded for human (Hs) versus murine (Mm) homology, wherein white corresponds to identical residues, darker shading corresponds to similar residues, and lighter shading corresponds to dissimilar residues. These differences in the binding interface between human and murine PD-L1 are consistent with the lack of murine PD-L1 cross-reactivity seen with SEQ ID NO: 187.

[0111] FIG. 26G shows a co-crystal structure of SEQ ID NO: 187 and PD-L1 in which SEQ ID NO: 187 is illustrated as a wire diagram with side chains of interest shown with thick sticks (top). PD-1 binding to PD-L1 is shown at bottom for comparison.

### DETAILED DESCRIPTION

[0112] Described herein are compositions and methods for selective depletion of a target molecule using cellular endocytic pathways (e.g., transferrin receptor-mediated endocytosis). Extracellular, soluble, and cell-surface proteins mediate signaling between cells and organs, including growth, cell death, inflammation, metabolism, and more. Such proteins are regularly cycled through production, use, and degradation, and their degradation is typically within the endosomal-lysosomal pathway. In this pathway, endocytic vesicles containing material taken up from extracellular space as well as embedded membrane proteins become acidified and fuse with or enter lysosomes containing enzymes that degrade such proteins. Selective removal of certain cell surface or soluble proteins, either from circulation or disease-associated tissues, via selective delivery to the lysosome can be used to treat disease conditions, including diseases resulting from over-expression or accumulation of soluble or cell surface proteins or diseases associated with mutations (e.g., mutations causing constitutive activity, resistance to treatment, or dominant negative activity) in soluble or surface proteins. Alternatively or in addition, the selective depletion complexes described herein can be used to deliver an administered therapeutic drug to an endosomal or lysosomal compartment, for example to treat lysosomal storage diseases like Gaucher's Disease (deficiency of glucocerebrosidase) or Pompe Disease (deficiency of α-glucosidase). A therapeutic molecule (e.g., a lysosomal enzyme for an enzyme replacement therapy) can be administered with a selective depletion complex comprising a target-binding peptide that binds the therapeutic molecule, thereby delivering the therapeutic molecule to the endosome or lysosome. In some embodiments, a selective depletion construct can function as a selective delivery complex and facilitate delivery of active enzymes to an endosome or lysosome. For example, a lysosomal enzyme can be delivered using a selective depletion complex and can retain enzymatic activity in the endosome or lysosome. Administration of a lysosomal enzyme in combination with a selective depletion complex comprising a target-binding peptide that binds the lysosomal enzyme can increase the therapeutic response per dose of enzyme administered relative to administration of the lysosomal enzyme alone. For either selective depletion of target proteins or delivery of lysosomal proteins, lysosomal delivery could be accomplished by taking advantage of existing protein uptake and recycling mechanisms, and engineering of pH-dependent binding domains into target-binding molecules.

[0113] A unique example of an endocytic pathway that can be used for selective depletion of target molecules is via transferrin receptor (TfR) internalization and trafficking, which is normally used for transferrin recycling via transferrin receptor (TfR) for iron delivery to cells and tissues. Transferrin is known as a serum chaperone for iron ions destined for redox sensitive intracellular enzymes. Iron-loaded transferrin (holo-transferrin) delivers iron to cells via specific binding to TfR, which is then trafficked to endosomes, where the pH is reduced by native proton pumps. Under acidic conditions, transferrin loses its iron binding affinity, releasing iron inside the cell, but maintains its TfR-binding affinity. The TfR:transferrin complex is natively recycled back to the cell surface, exposing transferrin to neutral pH conditions. Transferrin unbound by iron (apo-transferrin) no longer has TfR affinity under neutral pH conditions at the cell surface, and is released back into circulation to pick up more iron, and repeat the process, in what is essentially a catalytic process for iron delivery to cells.

[0114] The compositions and methods of this disclosure exploit the transferrin receptor endocytic and recycling pathways to deliver target molecules (e.g., soluble or cell surface proteins) to endocytic vesicles for lysosomal degradation. The compositions and methods of this disclosure can be used to selectively degrade specific target receptor or soluble proteins that are over-expressed in disease via this pathway. As a result of lysosomal degradation of the target receptors or soluble proteins, the compositions and methods described effectively reduce, diminish, eliminate or deplete the target receptors from the cell surface or soluble proteins in circulation, which has many applications in medicine as described herein. Selective depletion complexes of the present disclosure comprising a TfR-binding peptide (e.g., a TfR-binding cystine-dense peptide) coupled to a target-binding peptide (e.g., a target-binding cystine-dense peptide, a target-binding antibody, a target-binding nanobody, a target-binding antibody fragment, or other targeting agent) can recruit a target molecule to the TfR by binding to both the TfR (via the TfR-binding peptide) and to the target (via the target-binding peptide). Upon endocytosis, the TfR can carry the selective depletion complex and the target molecule into the endocytic vesicle. In some embodiments, the TfR-binding peptide of the selective depletion complex can have high affinity for TfR at extracellular pH (about pH 7.4) to endosomal pH (about pH 5.5), inclusive. The TfR-binding peptide can maintain its affinity for TfR upon internalization and as the endosomal compartment acidifies. The target-binding peptide of the selective depletion complex can have higher affinity for the target molecule at extracellular pH and lower affinity for the target molecule at a lower endosomal pH. Inside the endocytic vesicle, the selective depletion complex can remain bound to TfR and release the target molecule upon acidification of the endosome. Once the target is released, the selective depletion complex can remain bound to TfR while TfR is recycled to the cell surface to be reloaded with another target molecule, and the target molecule can remain in the endosome where it is delivered to a lysosome and degraded. In some embodiments, the TfR-binding peptide of the selective depletion complex can have higher affinity for TfR at extracellular pH and lower affinity for the target molecule at a lower endosomal pH. Inside the endocytic vesicle, the selective depletion complex can release from TfR upon acidification of the endosome.

[0115] The methods of the present disclosure can comprise contacting a cell (e.g., a cell expressing TfR) with a selective depletion complex (e.g., a molecule comprising a TfR-binding peptide and a target-binding peptide). The selective depletion complex can recruit target molecules into endocytic vesicles via transferrin receptor-mediated (TfR-mediated) endocytosis.

[0116] The target molecule can be released in the endocytic vesicle where it is delivered to the lysosome and degraded. The selective depletion complex can remain bound to the TfR and can remain bound to TfR as TfR is recycled to the cell surface. Such methods can be used to deplete a target molecule, such as a molecule associated with a disease or a condition. For example, the methods of the present disclosure can be used to selectively deplete a soluble protein or a cell surface protein that is over-expressed, contains a disease-associated mutation (e.g., a mutation causing constitutive activity, resistance to treatment, or dominant negative activity), or accumulates in a disease or a condition.

[0117] In some embodiments, the presently described selective depletion complex can comprise peptide conjugates, peptide complexes, peptide constructs, fusion peptides, or fusion molecules such as linked by chemical conjugation of any molecule type, such as small molecules, peptides, or proteins, or by recombinant fusions of peptides or proteins, respectively (e.g., a peptide construct or a peptide complex). The terms “fusion peptide” and “peptide fusion” are used interchangeably herein. In some embodiments, the peptide constructs or peptide complexes can be produced biologically or synthetically. Thus, in some cases, a selective depletion complex can comprise a TfR-binding peptide domain linked to another molecule or group of molecules such as small molecules, peptides, or proteins or other macromolecules such as nanoparticles.

[0118] In some embodiments, the presently described selective depletion complexes can be peptide complexes comprising one or more TfR-binding peptides as described herein conjugated to, linked to, or fused to one or more target-binding peptides, one or more active agents (e.g., therapeutic agents, detectable agents, or combinations thereof), or combinations thereof. Selective depletion complexes as described herein can include chemical conjugates and recombinant fusion molecules. In some cases, a chemical conjugate can comprise a TfR-binding peptide as described herein that is chemically conjugated to or linked to another peptide (e.g., a target-binding peptide), a molecule, an agent, or a combination thereof. Molecules can include small molecules, peptides, polypeptides, proteins, or other macromolecules (e.g., nanoparticles) and polymers (e.g., nucleic acids, polylysine, or polyethylene glycol). In some cases, a TfR-binding peptide of the present disclosure is conjugated to another peptide or a molecule via a linker. Linker moieties can include cleavable (e.g., pH sensitive or enzyme-labile linkers) or stable linkers. In some embodiments, a peptide complex is a fusion molecule (e.g., a fusion peptide or fusion protein) that can be recombinantly expressed, and wherein the fusion molecule can comprise one or more TfR-binding peptides fused to one or more other molecules peptides, polypeptides, proteins, or other macromolecules that can be recombinantly expressed.

[0119] The selective depletion complexes of this disclosure (e.g., complexes comprising a TfR-binding peptide and a target-binding peptide) can have a therapeutic effect at a lower dose or a longer lasting therapeutic effect as compared to lysosomal delivery molecules that are degraded and not recycled to the cell surface. Rather than being degraded in the lysosome, the selective depletion complexes of this disclosure can be recycled back to the cell surface to “reload” with the target, meaning that the potential for one selective depletion complex of this disclosure can drive the degradation of multiple target molecules with a potentially catalytic effect. A lysosomal delivery molecule that is not recycled to the cell surface can itself be degraded or can accumulate in the lysosome without being re-used or “reloaded”. The selective depletion complexes of this disclosure (e.g., complexes comprising a TfR-binding peptide and a target-binding peptide) can have a wider therapeutic window (i.e., the dosage above which a therapeutic pharmacodynamic response is observed but below which toxicity is observed) as compared to lysosomal delivery molecules that are not recycled to the cell surface. The therapeutic window of a drug (e.g., a selective depletion complex of the present disclosure) is the dose range at which the drug is effective without having unacceptable toxic effects. The selective depletion complexes of this disclosure (e.g., complexes comprising a TfR-binding peptide and a target-binding peptide) can be used with less risk of toxicity. The selective depletion complexes of this disclosure (e.g., complexes comprising a TfR-binding peptide and a target-binding peptide) can be used at lower molar dosage than alternative therapies (e.g., lysosomal delivery molecules) that are not recycled to the cell surface. Because of the selectivity and re-usable nature of the selective depletion complexes of this disclosure in the cell, as therapeutic agents they are advantageously not depleted as rapidly as non-recyclable delivery compositions targeted to lysosomes which are depleted as they are used. Moreover, because of the selectivity and recycling aspect of the selective depletion complexes of this disclosure, as therapeutic agents they are advantageously less toxic than non-selective therapeutic agents. This is particularly advantageous for applications in cancer, where therapeutic agents can be non-selective and highly toxic and exhibit detrimental side effects on normal cells, organs and tissues, or require lower than effective therapeutic doses less able to reduce, cure, ablate disease.

[0120] The selective depletion complexes of this disclosure (e.g., complexes comprising a TfR-binding peptide and a target-binding peptide) can have less immunogenicity than an alternative therapy (e.g., a lysosomal delivery molecule) that contains sugars, glycans, polymers containing sugar-like molecules, or other derivatives. A selective depletion complex of this disclosure can have less immunogenicity than an alternative therapy (e.g., a lysosomal delivery molecule) that targets the mannose-6-phosphate receptor or the asialoglycoprotein receptor. A selective depletion complex of this disclosure can be manufactured by a single recombinant expression and can have improved manufacturing yield, purity, cost, or manufacturing time than a molecule that has multiple synthetic steps to generate a ligand for mannose-6-phosphate receptor or the asialoglycoprotein receptor. A selective depletion complex of this disclosure can have a greater therapeutic effect or a lower therapeutic dose due to the ability to design the linker for maximal ability to bind for the TfR and the target at the same time, including of the target is bound in the cell surface. The TfR-binding peptides, TfR-binding peptide conjugates, or TfR-binding fusion peptides of this disclosure can have fewer epitopes to trigger an adaptive immune response, resulting in reduced immunogenicity as compared to TfR-binding antibody-based therapeutics. The TfR-binding peptides, TfR-binding peptide conjugates, or TfR-binding fusion peptides of this disclosure can exhibit more facile and less disruptive incorporation of active agents into protein fusion complexes as compared to TfR-binding antibody-based therapeutics. The TfR-binding peptides, TfR-binding peptide conjugates, or TfR-binding fusion peptides of this disclosure can have a smaller surface area, resulting in lower risk for off-target binding, as compared to TfR-binding antibody-based therapeutics. The TfR-binding peptides, TfR-binding peptide conjugates, or TfR-binding fusion peptides of this disclosure can be formulated at a higher molar concentration than TfR-binding antibody-based therapeutics due to their lower molecule weight, lower hydrodynamic radius, or lower molar solution viscosity.

[0121] In some embodiments, the TfR-binding peptides, TfR-binding peptide conjugates, or TfR-binding fusion peptides of this disclosure exhibit lower on-target toxicity than an anti-TfR antibody or other therapeutic agents when administered to a subject at the same molar dose or at a similarly effective dose. In some embodiments, the TfR-binding peptides, TfR-binding peptide conjugates, or TfR-binding fusion peptides exhibit lower off-target toxicity than an antibody or other therapeutic agent when administered to a subject at the same molar dose or a similarly effective dose. For example, the TfR-binding peptides, TfR-binding peptide conjugates, or TfR-binding fusion peptides of this disclosure can be administered to a subject at about 1-fold, 2-fold, 3-fold, 4-fold, 5-fold, 10-fold, 15-fold, 20-fold, 25-fold, 30-fold, 40-fold, 50-fold, 60-fold, 70-fold, 80-fold, 90-fold, 100-fold higher molar dose than an antibody while providing similar or lower observed toxicity. In some embodiments, the TfR-binding peptides, TfR-binding peptide conjugates, or TfR-binding fusion peptides of this disclosure exhibit higher efficacy than an anti-TfR antibody or other therapeutic agent when administered to a subject at the same dose by weight as the anti-TfR antibody or other therapeutic agent. The TfR-binding peptides of the present disclosure, when fused to a half-life extending moiety (e.g., Fc, SA21, PEG), can be delivered at even lower doses while preserving activity and efficacy and, thus, is far superior to administering an anti-TfR antibody or other therapeutic agent.

[0122] In some embodiments, the present disclosure provides peptides (e.g., CDPs, knotted peptides, or hitchins), chemical conjugates (e.g., comprising one or more TfR-binding peptides and one or more active agents), or recombinantly expressed fusion molecules (e.g., comprising one or more TfR-binding peptides and one or more active agents) that bind to TfR. The TfR-binding peptides can be cystine-dense peptides (CDPs). The terms “peptides”, “miniproteins”, “proteins”, “CDPs”, “TfR-binding peptides,” “TfR-binding CDPs,” “TfR-binding peptides,” and “engineered TfR-binding peptides” are used interchangeably herein. The binding of peptides described in the present disclosure to TfR can facilitate transcytosis of the selective depletion complex, peptide, peptide complex or peptide construct (e.g., fusion protein, or peptide conjugated to, linked to, or fused to an agent) across a cell barrier (e.g., the BBB). The binding of peptides described in the present disclosure to TfR can facilitate endocytosis of the selective depletion complex, peptide, or peptide complex in any cell that expresses TfR, or in cell that express TfR at higher levels, including some cancer cells, hepatic cells, spleen cells, and bone marrow cells. Also disclosed herein is the use of a mammalian surface display screening platform to screen a diverse library of CDPs and identify CDPs that specifically bind to human TfR. Such identified peptides can be modified to improve binding to TfR and used in selective depletion complexes as the peptide or peptide complex that binds TfR and is recycled to the cell surface (e.g., the pH-independent TFR-binding CDP as shown in FIG. 12A and FIG. 12B). Also disclosed herein is the use of a mammalian surface display screening platform to screen a diverse library of CDPs and identify CDPs that specifically bind to a target that is desired to be degraded. Such identified peptides can be optimized for binding to a selected target and used in selective depletion complexes as the peptide or peptide complex that binds such selected target and is released in the endosome for degradation within the cell (e.g., the pH-dependent target-binding CDP as shown in FIG. 12A and FIG. 12B). Further affinity maturation can be subsequently implemented to produce an allelic series of TfR-binding CDPs or target-binding CDPs as appropriate with varying affinities. In some embodiments, TfR-binding CDPs or target-binding CDPs are identified and binding can be determined by crystallography or other methods. Peptides of the present disclosure can have cross-reactivity across species. For example, the peptides disclosed herein, in some cases, bind to human and murine TfR. Peptides disclosed herein can accumulate in the CNS and can penetrated the BBB via engagement of the TfR, following intravenous administration. Disclosed herein are TfR-binding CDPs for use as therapeutic delivery agents in oncology, autoimmune disease, acute and chronic neurodegeneration, and pain management. Delivery of active or pharmaceutical agents via TfR-binding CDP can be advantageous over conventional anti-TfR antibodies due to simpler manufacturing (peptides can be made via biologic or synthetic means), improved stability, improved therapeutic window, and smaller size (less potential for steric hindrance of cargo activity). Thus, the methods and compositions of the present disclosure can provide a solution to the problem of effectively transporting cargo molecules (e.g., therapeutic and/or diagnostic small molecules, peptides or proteins) into the CNS (e.g., the brain). For example, the peptides of the present disclosure aid in drug delivery to tumors located in the brain.

[0123] In some embodiments of the present disclosure, a diverse library of CDPs, knotted peptides, hitchins, or peptides derived from knotted peptides or hitchins can be used in combination with a mammalian surface display screening platform is used to identify peptides that specifically bind to human TfR desired for recycling or to a target desired for degradation. (See e.g., Crook et al. (2017) Mammalian display screening of diverse cystine-dense peptides for difficult to drug targets. Nat Commun 8:2244). In some embodiments, a diverse library of CDPs, knotted peptides, hitchins, or peptides derived from knotted peptides or hitchins is mutagenized from endogenous peptide sequences to provide novel peptide sequences. Once TfR-binding or target-binding peptides have been identified, affinity maturation (e.g., site-saturation mutagenesis) can be performed to produce an allelic series of binders with varying (e.g., improved) affinities for TfR or a target. These techniques can be used in combination with various other analytical methods (e.g., crystallography or spectroscopy) in order to determine the nature of peptide-receptor interaction (e.g., critical amino acid residues for receptor binding etc.). In some cases, the peptides of the present disclosure are developed to bind human TfR.

[0124] In some embodiments, the engineered peptides of the present disclosure (e.g., histidine-containing or histidine-enriched target-binding peptides) can have a high target binding affinity at physiologic extracellular pH (e.g., a pH from about pH 7.2 to about pH 7.5, a pH of from about pH 6.5 to about 7.5, or a pH of from about pH 6.5 to about pH 6.9) but a significantly reduced binding affinity at lower pH levels such as endosomal pH of about 6.5, about 6.0, or about 5.5. Extracellular pH can be, for example pH 7.4. Extracellular pH can also be lower, including in the tumor microenvironment, such as pH 7.2, 7.0, or 6.8. In some embodiments, for example in a tumor environment, extracellular pH can be from about pH 6.5 to about pH 6.9. Upon endocytosis, the endosome undergoes a decrease in pH. Endosomal pH can decrease by the action of proton pumps or by merging with other vesicles with lower pH. The pH can decrease to 7.0, and then to 6.5, and then to 6.0, and then to 5.5 or lower. Some endosomes are called early endosomes and can have a pH around 6.5. Some of these endosomes become recycling endosomes. Some endosomes are called late endosomes and can have a pH around 5.5. Some endosomes become or merge with lysosomes, where the pH can be 4.5. Enzymes and other factors in the lysosome can cause degradation of the contents of the lysosome. In some embodiments, the target-binding peptides release in the endosome at about pH 7.3, pH 7.2, pH 7.1, pH 7.0, pH 6.9, pH 6.8, pH 6.7, pH 6.6, pH 6.5, pH 6.4, pH 6.3, pH 6.2, pH 6.1, pH 6.0, pH 5.9, pH 5.8, pH 5.7, pH 5.6, pH 5.5, pH 5.4, pH 5.3, pH 5.2, pH 5.1, pH 5.0, pH 4.9, pH 4.8, pH 4.7, pH 4.6, pH 4.5, or lower. In some embodiments, the target-binding peptide may release at any point during the endosomal maturation process upon a decrease in pH following endocytosis. In some cases, histidine scans and comparative binding experiments can be performed to develop and screen for such peptides. In some embodiments, an amino acid residue in a peptide of the present disclosure is substituted with a different amino acid residue to alter a pH-dependent binding affinity to the target or to TfR. The amino acid substitution can increase a binding affinity at low pH, increase a binding affinity at high pH, decrease a binding affinity at low pH, decrease a binding affinity at high pH, or a combination thereof. For example, a peptide that has high affinity to TfR and used in selective depletion complexes as the peptide or peptide complex that binds TfR for recycling to the cell surface can be a pH-independent TfR-binding peptide (e.g., a pH-independent TfR-binding CDP) such that it is not released in the endosome. In some embodiments, the TfR-binding peptide can remain bound to TfR as the ionic strength of the endosomal compartment increases upon acidification of the endosome. In some embodiments the TfR-binding peptides are stable at endosomal pH, and do not release in the endosome for example under acidic conditions, such as pH 6.9, pH 6.8, pH 6.7, pH 6.6, pH 6.5, pH 6.4, pH 6.3, pH6.2, pH 6.1, pH 6.0, pH 5.9, pH 5.8, pH 5.7, pH 5.6, pH 5.5, pH 5.4, pH 5.3, pH 5.2, pH 5.1, pH 5.0, pH 4.9, pH 4.8, pH 4.7, pH 4.6, pH 4.5, or lower. Conversely, a peptide that has high affinity for binding to a selected target and used in selective depletion complexes as the peptide or peptide complex that binds such selected target and is released in the endosome for degradation within the cell can be a pH-dependent target-binding CDP such that it is released in the endosome. In some embodiments, a target-binding peptide can release the target as the ionic strength of the endosomal compartment increases upon acidification of the endosome. In some embodiments the target-binding peptides are less stable at endosomal pH, and release wholly or in part in the endosome for example under acidic conditions, such as pH 7.3, pH 7.2, pH 7.1, pH 7.0, pH 6.9, pH 6.8, pH 6.7, pH 6.6, pH 6.5, pH 6.4, pH 6.3, pH 6.2, pH 6.1, pH 6.0, pH 5.9, pH 5.8, pH 5.7, pH 5.6, pH 5.5, pH 5.4, pH 5.3, pH 5.2, pH 5.1, pH 5.0, pH 4.9, pH 4.8, pH 4.7, pH 4.6, pH 4.5, or lower. In some cases, the TfR-binding peptides of the present disclosure can be optimized for improved intra-vesicular (e.g., intra-endosomal) function while retaining high TfR binding capabilities. Exemplary TfR-binding peptides of the present disclosure are shown in TABLE 1 with amino acid sequences set forth in SEQ ID NO: 96, SEQ ID NO: 65-SEQ ID NO: 95, SEQ ID NO: 97-SEQ ID NO: 128, SEQ ID NO: 220-SEQ ID NO: 222, or SEQ ID NO: 1-SEQ ID NO: 64.

[0125] Described herein are, in some embodiments, peptides and peptide complexes and methods of screening for peptides and peptide complexes that bind to a protein or molecule of interest, such as TfR, or bind to a target molecule for depletion, or both. Compared to wild type or endogenous molecules such as transferrin, the methods and compositions as described herein can provide peptides with improved TfR-binding capabilities, or peptides that exhibit improved transport capabilities across the BBB, or any combination thereof. In some cases, the presently described peptides efficiently transport cargo molecules (e.g., target-binding molecules) across endothelial cell layers (e.g., the BBB) or epithelial layers. In some embodiments, the TfR-binding peptides of the present disclosure bind to a TfR and promote vesicular transcytosis. In some cases, the TfR-binding peptides of the present disclosure bind to a cell that overexpress a TfR (e.g., a cancer cell) and promotes uptake of the peptide by the cell. In some aspects a TfR binding peptide or peptide complexes as described herein promotes vesicular transcytosis and uptake by a TfR-overexpressing cell such as a cancer, or a combination thereof. In some cases, the TfR-binding peptides of the present disclosure facilitate TfR-mediated endocytosis of a selective depletion complex and a target molecule.

[0126] The TfR-binding peptides of the present disclosure can bind TfR of different species including human, monkey, mouse, and rat TfR. In some cases, variations or mutations in any of the amino acid residues of a TfR-binding peptide can influence cross-reactivity. In some cases, variations or mutations in any of the amino acid residues of a TfR-binding peptide that interact with the bindings site of TfR can influence cross-reactivity.

[0127] Described herein are peptides, including, but not limited to, designed or engineered peptides, recombinant peptides, and cystine-dense peptides (CDPs)/small disulfide-knotted peptides (e.g., knotted peptides, hitchins, and peptides derived therefrom), that can be large enough to carry a cargo molecule while retaining the ability to bind a target protein with high affinity (e.g., TfR), but yet small enough to access cellular tissues, such as the center of cell agglomerates (e.g., solid tumors). In some cases, the peptides as described herein carry cargo molecules across the BBB into the CNS (e.g., the parenchyma) via vascular transcytosis. In some cases, the transcytosis is TfR-mediated.

[0128] Further described herein are methods and compositions for determining the nature of peptide-receptor interactions (e.g., using X-ray crystallography) as well as their pharmacodynamic and pharmacokinetic properties in vivo, including accumulation in the CNS (e.g., brain), or other affected organs and tissues. Some of the peptides described herein have the ability to target and accumulate in tumor cells. In some cases, the tumor cells overexpress TfR. In some aspects, the peptides of the present disclosure have high in vivo stabilities, e.g., high protease stability, high tolerability of reducing agents such as glutathione (GSH), and tolerate elevated temperatures (e.g., up to 95° C.).

[0129] The present disclosure provides, in some embodiments, a peptide or protein design approach based on the 3D protein or receptor structure for identifying peptides or proteins capable of binding such receptor. In some cases, the receptor is a transferrin receptor.

[0130] As used herein, the abbreviations for the natural L-enantiomeric amino acids are conventional and are as follows: alanine (A, Ala); arginine (R, Arg); asparagine (N, Asn); aspartic acid (D, Asp); cysteine (C, Cys); glutamic acid (E, Glu); glutamine (Q, Gln); glycine (G, Gly); histidine (H, His); isoleucine (I, Ile); leucine (L, Leu); lysine (K, Lys); methionine (M, Met); phenylalanine (F, Phe); proline (P, Pro); serine (S, Ser); threonine (T, Thr); tryptophan (W, Trp); tyrosine (Y, Tyr); valine (V, Val). Typically, Xaa can indicate any amino acid. In some embodiments, X can be asparagine (N), glutamine (Q), histidine (H), lysine (K), or arginine (R).

[0131] Some embodiments of the disclosure contemplate D-amino acid residues of any standard or non-standard amino acid or analogue thereof. When an amino acid sequence is represented as a series of three-letter or one-letter amino acid abbreviations, the left-hand direction is the amino terminal direction and the right-hand direction is the carboxy terminal direction, in accordance with standard usage and convention.

[0132] The terms “peptide”, “polypeptide”, “miniprotein”, “protein”, “hitchin”, “cystine-dense peptide”, “knotted peptides” or “CDP” can be used interchangeably herein to refer to a polymer of amino acid residues. In various embodiments, “peptides”, “polypeptides”, and “proteins” can be chains of amino acids whose alpha carbons are linked through peptide bonds. The terminal amino acid at one end of the chain (e.g., amino terminal, or N-terminal) therefore can have a free amino group, while the terminal amino acid at the other end of the chain (e.g., carboxy terminal, or C-terminal) can have a free carboxyl group. As used herein, the term “amino terminus” (e.g., abbreviated N-terminus) can refer to the free ca-amino group on an amino acid at the amino terminal of a peptide or to the ca-amino group (e.g., imino group when participating in a peptide bond) of an amino acid at any other location within the peptide. Similarly, the term “carboxy terminus” can refer to the free carboxyl group on the carboxy terminus of a peptide or the carboxyl group of an amino acid at any other location within the peptide. Peptides also include essentially any polyamino acid including, but not limited to, peptide mimetics such as amino acids joined by an ether or thioether as opposed to an amide bond.

[0133] As used herein, the term “peptide construct” can refer to a molecule comprising one or more peptides of the present disclosure that can be conjugated to, linked to, or fused to one or more peptides or cargo molecules. In some cases, cargo molecules are active agents. The term “active agent” can refer to any molecule, e.g., any molecule that is capable of eliciting a biological effect and/or a physical effect (e.g., emission of radiation) which can allow the localization, detection, or visualization of the respective peptide construct. In various embodiments, the term “active agent” refers to a therapeutic and/or diagnostic agent. A peptide construct of the present disclosure can comprise a TfR-binding peptide that is linked to one or more active agents via one or more linker moieties (e.g., cleavable or stable linker) as described herein.

[0134] As used herein, the term “peptide complex” can refer to one or more peptides of the present disclosure that are fused, linked, conjugated, or otherwise connected to form a complex. In some cases, the one or more peptides can comprise a TfR-binding peptide, a target-binding peptide, a half-life modifying peptide, a peptide that modifies pharmacodynamics and/or pharmacokinetic properties, or combinations thereof. For example, a peptide complex comprising a TfR-binding peptide and a target-binding peptide can be referred to herein as a selective depletion complex.

[0135] As used herein, the terms “comprising” and “having” can be used interchangeably. For example, the terms “a peptide comprising an amino acid sequence of SEQ ID NO: 32” and “a peptide having an amino acid sequence of SEQ ID NO: 32” can be used interchangeably.

[0136] As used herein, and unless otherwise stated, the term “TfR” or “transferrin receptor” is a class of protein used herein and can refer to a transferrin receptor from any species (e.g., human or murine TfR or any human or non-human animal TfR). In some cases, and as used herein, the term “TfR” or “transferrin receptor” refers to human TfR (hTfR) and can include TfR or any of the known TfR homologs or orthologs, including TfR1, TfR2, soluble TfR, or any combination or fragment (e.g., ectodomain) thereof.

[0137] As used herein, the terms “endosome,” “endosomal,” “endosomal compartment,” or “endocytic pathway” can be used interchangeably and may refer to any one or more components of the intracellular endosomal network or trans-Golgi network (TGN) that allows for the vesicular transcytosis or trafficking and transfer of peptides and cargoes between distinct membrane-bound compartments within a cell, including lysosomal degradation as well as recycling to the cell surface. It is understood that such pathway involves and includes the maturation and transition of vesicles commonly referred to as transport vesicles or early endosomes to late endosomes to lysosomes, and that endosomal compartment acidity increases upon acidification of the endosome throughout the maturation process. Lysosomes serving as the last vesicle in the matured endocytic pathway typically contain hydrolytic enzymes which digest the contents of the late endosomes. Other endosomes continue to a pathway of recycling endosomes, where the contents are recycled back to the cell surface.

[0138] As used herein “pH-independent,” when used in reference to a molecule or moiety, refer means that as the endosomal compartment is acidified, the binding affinity of the molecule or moiety to its target does not change sufficiently to enable dissociation in the endosome with the target. For example, the referenced molecule or moiety has the same or similar affinity to its target at extracellular pH and at an endosomal pH. It is also understood that pH-independent molecules or moieties do not include pH-dependent molecules or moieties, since the binding affinity of pH-dependent molecules or moieties to its target changes as it enters and proceeds through the endosomal pathway, for example, to enable dissociation in the endosome with the target to some degree, or the referenced molecule or moiety has a different affinity at extracellular pH and at an endosomal pH.

[0139] The term “engineered,” when applied to a polynucleotide, denotes that the polynucleotide has been removed from its natural genetic milieu and is thus free of other extraneous or unwanted coding sequences and is in a form suitable for use within genetically engineered protein production systems. Such engineered molecules are those that are separated from their natural environment and include cDNA and genomic clones (i.e., a prokaryotic or eukaryotic cell with a vector containing a fragment of DNA from a different organism). Engineered DNA molecules of the present invention are free of other genes with which they are ordinarily associated but can include naturally occurring or non-naturally occurring 5′ and 3′ untranslated regions such as enhancers, promoters and terminators.

[0140] An “engineered” polypeptide or protein is a polypeptide or protein that is found in a condition other than its native environment, such as apart from blood and animal tissue. In a preferred form, the engineered polypeptide is substantially free of other polypeptides, particularly other polypeptides of animal origin. It is preferred to provide the polypeptides in a highly purified form, e.g., greater than 90% pure, greater than 95% pure, more preferably greater than 98% pure or greater than 99% pure. When used in this context, the term “engineered” does not exclude the presence of the same polypeptide in alternative physical forms, such as dimers, heterodimers and multimers, heteromultimers, or alternatively glycosylated, carboxylated, modified, or derivatized forms.

[0141] An “engineered” peptide or protein is a polypeptide that is distinct from a naturally occurring polypeptide structure, sequence, or composition. Engineered peptides include non-naturally occurring, artificial, isolated, synthetic, designed, modified, or recombinantly expressed peptides. Provided herein are engineered TfR-binding peptides, variants, or fragments thereof. These engineered TfR-binding peptides can be further linked to a target-binding moiety or a half-life extending moiety, or can be further linked to an active agent or detectable agent, or any combination of the foregoing.

[0142] Polypeptides of the disclosure include polypeptides that have been modified in any way, for example, to: (1) reduce susceptibility to proteolysis, (2) reduce susceptibility to oxidation, (3) alter binding affinity for forming protein complexes, (4) alter binding affinities, (5) alter binding affinity at certain pH values, and (6) confer or modify other physicochemical or functional properties. For example, single or multiple amino acid substitutions (e.g., conservative amino acid substitutions) are made in the naturally occurring sequence (e.g., in the portion of the polypeptide outside the domain(s) forming intermolecular contacts). A “conservative amino acid substitution” can refer to the substitution in a polypeptide of an amino acid with a functionally similar amino acid. The following six groups each contain amino acids that can be conservative substitutions for one another: i) Alanine (A), Serine (S), and Threonine (T); ii) Aspartic acid (D) and Glutamic acid (E); iii) Asparagine (N) and Glutamine (Q); iv) Arginine (R) and Lysine (K); v) Isoleucine (I), Leucine (L), Methionine (M), and Valine (V); vi) Phenylalanine (F), Tyrosine (Y), and Tryptophan (W). In some embodiments, a conserved amino acid substitution can comprise a non-natural amino acid. For example, substitution of an amino acid for a non-natural derivative of the same amino acid can be a conserved substitution.

[0143] The terms “polypeptide fragment” and “truncated polypeptide” as used herein can refer to a polypeptide that has an amino-terminal and/or carboxy-terminal deletion as compared to a corresponding full-length peptide or protein. In various embodiments, fragments are at least 5, at least 10, at least 15, at least 20, at least 25, at least 30, at least 35, at least 40, at least 45, at least 50, at least 100, at least 150, at least 200, at least 250, at least 300, at least 350, at least 400, at least 450, at least 500, at least 600, at least 700, at least 800, at least 900 or at least 1000 amino acids in length. In various embodiments, fragments can also be, e.g., at most 1000, at most 900, at most 800, at most 700, at most 600, at most 500, at most 450, at most 400, at most 350, at most 300, at most 250, at most 200, at most 150, at most 100, at most 50, at most 45, at most 40, at most 35, at most 30, at most 25, at most 20, at most 15, at most 10, or at most 5 amino acids in length. A fragment can further comprise, at either or both of its ends, one or more additional amino acids, for example, a sequence of amino acids from a different naturally-occurring protein (e.g., an Fc or leucine zipper domain) or an artificial amino acid sequence (e.g., an artificial linker sequence).

[0144] As used herein, the terms “peptide” or “polypeptide” in conjunction with “variant” “mutant” or “enriched mutant” or “permuted enriched mutant” can refer to a peptide or polypeptide that can comprise an amino acid sequence wherein one or more amino acid residues are inserted into, deleted from and/or substituted into the amino acid sequence relative to another polypeptide sequence. In various embodiments, the number of amino acid residues to be inserted, deleted, or substituted is at least 1, at least 2, at least 3, at least 4, at least 5, at least 10, at least 25, at least 50, at least 75, at least 100, at least 125, at least 150, at least 175, at least 200, at least 225, at least 250, at least 275, at least 300, at least 350, at least 400, at least 450 or at least 500 amino acids in length. Variants of the present disclosure include peptide conjugates or fusion molecules (e.g., peptide constructs or peptide complexes).

[0145] A “derivative” of a peptide or polypeptide can be a peptide or polypeptide that can have been chemically modified, e.g., conjugation to another chemical moiety such as, for example, polyethylene glycol, albumin (e.g., human serum albumin), phosphorylation, and glycosylation.

[0146] The term “% sequence identity” can be used interchangeably herein with the term “% identity” and can refer to the level of amino acid sequence identity between two or more peptide sequences or the level of nucleotide sequence identity between two or more nucleotide sequences, when aligned using a sequence alignment program. For example, as used herein, 80% identity means the same thing as 80% sequence identity determined by a defined algorithm, and means that a given sequence is at least 80% identical to another length of another sequence. In various embodiments, the % identity is selected from, e.g., at least 60%, at least 65%, at least 70%, at least 75%, at least 80%, at least 85%, at least 90%, at least 91%, at least 92%, at least 93%, at least 94%, at least 95%, at least 96%, at least 97%, at least 98%, at least 99%, or at least 99% or more up to 100% sequence identity to a given sequence. In various embodiments, the % identity is in the range of, e.g., about 60% to about 70%, about 70% to about 80%, about 80% to about 85%, about 85% to about 90%, about 90% to about 95%, or about 95% to about 99%.

[0147] The terms “% sequence homology” or “percent sequence homology” or “percent sequence identity” can be used interchangeably herein with the terms “% homology,” “% sequence identity,” or “% identity” and can refer to the level of amino acid sequence homology between two or more peptide sequences or the level of nucleotide sequence homology between two or more nucleotide sequences, when aligned using a sequence alignment program. For example, as used herein, 80% homology means the same thing as 80% sequence homology determined by a defined algorithm, and accordingly a homologue of a given sequence has greater than 80% sequence homology over a length of the given sequence. In various embodiments, the % homology is selected from, e.g., at least 60%, at least 65%, at least 70%, at least 75%, at least 80%, at least 85%, at least 90%, at least 91%, at least 92%, at least 93%, at least 94%, at least 95%, at least 96%, at least 97%, at least 98%, or at least 99% or more up to 100% sequence homology to a given sequence. In various embodiments, the % homology is in the range of, e.g., about 60% to about 70%, about 70% to about 80%, about 80% to about 85%, about 85% to about 90%, about 90% to about 95%, or about 95% to about 99%.

[0148] A protein or polypeptide can be “substantially pure,” “substantially homogeneous”, or “substantially purified” when at least about 60% to 75% of a sample exhibits a single species of polypeptide. The polypeptide or protein can be monomeric or multimeric. A substantially pure polypeptide or protein can typically comprise about 50%, 60%, 70%, 80% or 90% W/W of a protein sample, more usually about 95%, and e.g., will be over 98% or 99% pure. Protein purity or homogeneity can be indicated by a number of means well known in the art, such as polyacrylamide gel electrophoresis of a protein sample, followed by visualizing a single polypeptide band upon staining the gel with a stain well known in the art. For certain purposes, higher resolution is provided by using high-pressure liquid chromatography (e.g., HPLC) or other high-resolution analytical techniques (e.g., LC-mass spectrometry).

[0149] As used herein, the term “pharmaceutical composition” can generally refer to a composition suitable for pharmaceutical use in a subject such as an animal (e.g., human or mouse). A pharmaceutical composition can comprise a pharmacologically effective amount of an active agent and a pharmaceutically acceptable carrier. The term “pharmacologically effective amount” can refer to that amount of an agent effective to produce the intended biological or pharmacological result.

[0150] As used herein, the term “pharmaceutically acceptable carrier” can refer to any of the standard pharmaceutical carriers, vehicles, buffers, and excipients, such as a phosphate buffered saline solution, or a buffered saline solution, 5% aqueous solution of dextrose, and emulsions, such as an oil/water or water/oil emulsion, and various types of wetting agents and/or adjuvants. Suitable pharmaceutical carriers and formulations are described in Remington's Pharmaceutical Sciences, 21^{st} Ed. 2005, Mack Publishing Co, Easton. A “pharmaceutically acceptable salt” can be a salt that can be formulated into a compound for pharmaceutical use including, e.g., metal salts (sodium, potassium, magnesium, calcium, etc.) and salts of ammonia or organic amines.

[0151] As used herein, the terms “treat”, “treating” and “treatment” can refer to a method of alleviating or abrogating a biological disorder and/or at least one of its attendant symptoms. As used herein, to “alleviate” a disease, disorder or condition, for example, means reducing the severity and/or occurrence frequency of the symptoms of the disease, disorder, or condition. Further, references herein to “treatment” can include references to curative, palliative, and prophylactic or diagnostic treatment.

[0152] Generally, a cell of the present disclosure can be a eukaryotic cell or a prokaryotic cell. A cell can be an epithelial cell. A cell can be a microorganism, bacterial, yeast, fungal or algae cell. A cell can be an animal cell or a plant cell. An animal cell can include a cell from a marine invertebrate, fish, insects, amphibian, reptile, or mammal. A mammalian cell can be obtained from a primate, ape, equine, bovine, porcine, canine, feline, or rodent. A mammal can be a primate, ape, dog, cat, rabbit, ferret, or the like. A rodent can be a mouse, rat, hamster, gerbil, hamster, chinchilla, or guinea pig. A bird cell can be from a canary, parakeet or parrots. A reptile cell can be from a turtles, lizard or snake. A fish cell can be from a tropical fish. For example, the fish cell can be from a zebrafish (e.g., Danino rerio). A worm cell can be from a nematode (e.g., C. elegans). An amphibian cell can be from a frog. An arthropod cell can be from a tarantula or hermit crab.

[0153] A mammalian cell can also include cells obtained from a primate (e.g., a human or a non-human primate). A mammalian cell can include a blood cell, a stem cell, an epithelial cell, connective tissue cell, hormone secreting cell, a nerve cell, a skeletal muscle cell, or an immune system cell.

[0154] As used herein, the term “vector,” generally refers to a DNA molecule capable of replication in a host cell and/or to which another DNA segment can be operatively linked so as to bring about replication of the attached segment. A plasmid is an exemplary vector.

[0155] As used herein, the term “subject,” generally refers to a human or to another animal. A subject can be of any age, for example, a subject can be an infant, a toddler, a child, a pre-adolescent, an adolescent, an adult, or an elderly individual.

[0156] Ranges can be expressed herein as from “about” one particular value, and/or to “about” another particular value. When such a range is expressed, another embodiment includes from the one particular value and/or to the other particular value. Similarly, when values are expressed as approximations, by use of the antecedent “about,” it will be understood that the particular value forms another embodiment. It will be further understood that the endpoints of each of the ranges are in relation to the other endpoint, and independently of the other endpoint. The term “about” as used herein refers to a range that is 15% plus or minus from a stated numerical value within the context of the particular usage. For example, about 10 can include a range from 8.5 to 11.5.

### Peptides

[0157] The selective depletion complexes of the present disclosure can comprise one or more peptides. For example, a selective depletion complex of the present disclosure can comprise a TfR-binding peptide and a target binding peptide. In some embodiments, two or more peptides can be connected via a linker. The peptides of the present disclosure (e.g., TfR-binding peptide, a target-binding peptide, or a peptide comprising a TfR-binding peptide linked to a target-binding peptide) can be used in a method of selectively depleting a target molecule. The peptides of the present disclosure (e.g., TfR-binding peptide, a target-binding peptide, or a peptide comprising a TfR-binding peptide linked to a target-binding peptide) can be recycled to the cell surface following endocytosis.

[0158] In some instances, a peptide as disclosed herein can contain only one lysine residue, or no lysine residues. In some instances, one or more or all of the lysine residues in the peptide are replaced with arginine residues. In some instances, one or more or all of the methionine residues in the peptide are replaced by leucine or isoleucine. One or more or all of the tryptophan residues in the peptide can be replaced by phenylalanine or tyrosine. In some instances, one or more or all of the asparagine residues in the peptide are replaced by glutamine. In some embodiments, one or more or all of the aspartic acid residues can be replaced by glutamic acid residues. In some instances, one or more or all of the lysine residues in the peptide are replaced by alanine or arginine. In some embodiments, the N-terminus of the peptide is blocked or protected, such as by an acetyl group or a tert-butyloxycarbonyl group. Alternatively or in combination, the C-terminus of the peptide can be blocked or protected, such as by an amide group or by the formation of an ester (e.g., a butyl or a benzyl ester). In some embodiments, the peptide is modified by methylation on free amines. For example, full methylation is accomplished through the use of reductive methylation with formaldehyde and sodium cyanoborohydride.

[0159] In some embodiments, the dipeptide GS can be added as the first two N-terminal amino acids, as shown in SEQ ID NO: 1-SEQ ID NO: 64, or such N-terminal dipeptide GS can be absent as shown in SEQ ID NO: 65-SEQ ID NO: 128, or can be substituted by any other one or two amino acids. In some embodiments, the dipeptide GS is used as a linker or used to couple to a linker to form a peptide conjugate or fusion molecules such as a peptide construct or peptide complex. In some embodiments, the linker comprises a GₓS_{y} (SEQ ID NO: 130) peptide, wherein x and y independently are any whole number, such as 1, 2, 3, 4, 5, 6, 7, 8, 9, and 10 and the G and S residues are arranged in any order. In some embodiments, the peptide linker comprises (GS)x (SEQ ID NO: 131), wherein x can be any whole number, such as 1, 2, 3, 4, 5, 6, 7, 8, 9, and 10. In some embodiments, the peptide linker comprises GGSSG (SEQ ID NO: 132), GGGGG (SEQ ID NO: 133), GSGSGSGS (SEQ ID NO: 134), GSGG (SEQ ID NO: 135), GGGGS (SEQ ID NO: 136), GGGS (SEQ ID NO: 129), GGS (SEQ ID NO: 137), GGGSGGGSGGGS (SEQ ID NO: 138), or a variant or fragment thereof or any number of repeats and combinations thereof. Additionally, KKYKPYVPVTTN (SEQ ID NO: 139) from DkTx, and EPKSSDKTHT (SEQ ID NO: 140) from human IgG3 can be used as a peptide linker or any number of repeats and combinations thereof. In some embodiments, the peptide linker comprises GGGSGGSGGGS (SEQ ID NO: 141) or a variant or fragment thereof or any number of repeats and combinations thereof. It is understood that any of the foregoing linkers or a variant or fragment thereof can be used with any number of repeats or any combinations thereof. It is also understood that other peptide linkers in the art or a variant or fragment thereof can be used with any number of repeats or any combinations thereof. The length of the linker can be tailored to maximize binding of the selective delivery complex to both TfR and the target at the same time including accounting for steric access. In some embodiments, the linker between the TfR-binding and target-binding peptides within the selective depletion complex is at least 5, at least 6, at least 7, at least 8, at least 9, at least 10, at least 11, at least 12, at least 13, at least 14, at least 15, at least 16, at least 17, at least 18, at least 19, at least 20, at least 21, at least 22, at least 23, at least 24, at least 25, at least 26, at least 27, at least 28, at least 29, at least 30, at least 31, at least 32, at least 33, at least 34, at least 35, at least 36 at least 37, at least 38, at least 39, at least 40, at least 41, at least 42, at least 43, at least 44, at least 45, at least 46, at least 47, at least 48, at least 49, at least 50, at least 51, at least 52, at least 53, at least 54, at least 55, at least 56, at least 57, at least 58, at least 59, at least 60, at least 61, at least 62, at least 63, at least 64, at least 65 residues incrementally up to 100 residues long, particularly for example if the target is not a soluble protein but rather a cell surface protein or cell receptor protein.

[0160] In some embodiments of the present disclosure, a peptide or peptide complex as described herein comprises an amino acid sequence set forth in any one of SEQ ID NO: 96, SEQ ID NO: 65-SEQ ID NO: 95, SEQ ID NO: 97-SEQ ID NO: 128, SEQ ID NO: 220-SEQ ID NO: 222, or SEQ ID NO: 1-SEQ ID NO: 64. A peptide as disclosed herein can be a fragment comprising a contiguous fragment of any one of SEQ ID NO: 96, SEQ ID NO: 65-SEQ ID NO: 95, SEQ ID NO: 97-SEQ ID NO: 128, SEQ ID NO: 220-SEQ ID NO: 222, or SEQ ID NO: 1-SEQ ID NO: 64 that is at least 7, at least 8, at least 9, at least 10, at least 11, at least 12, at least 13, at least 14, at least 15, at least 16, at least 17, at least 18, at least 19, at least 20, at least 21, at least 22, at least 23, at least 24, at least 25, at least 26, at least 27, at least 28, at least 29, at least 30, at least 31, at least 32, at least 33, at least 34, at least 35, at least 36 at least 37, at least 38, at least 39, at least 40, at least 41, at least 42, at least 43, at least 44, at least 45, at least 46, at least 47, at least 48, at least 49, at least 50, at least 51, at least 52, at least 53, at least 54, at least 55, at least 56, at least 57, at least 58, at least 59, at least 60, at least 61, at least 62, at least 63, at least 64, at least 65 residues long, wherein the peptide fragment is selected from any portion of the peptide. In some embodiments, the peptide sequence is flanked by additional amino acids. One or more additional amino acids, for example, confer a particular in vivo charge, isoelectric point, chemical conjugation site, stability, or physiologic property to a peptide.

[0161] In some instances, the peptides as described herein that are capable of targeting and binding to a TfR comprise no more than 80 amino acids in length, or no more than 70, no more than 60, no more than 40, no more than 35, no more than 30, no more than 25, no more than 20, no more than 15, or no more than 10 amino acids in length. In some instances, the peptides as described herein that are capable of targeting and binding to a target molecule comprise no more than 80 amino acids in length, or no more than 70, no more than 60, no more than 50, no more than 40, no more than 35, no more than 30, no more than 25, no more than 24, no more than 23, no more than 22, no more than 21, no more than 20, no more than 19, no more than 18, no more than 17, no more than 16, no more than 15, no more than 14, no more than 13, no more than 12, no more than 11, or no more than 10 amino acids in length.

[0162] In other embodiments, peptides can be conjugated to, linked to, or fused to a carrier or a molecule with targeting or homing function for a cell of interest or a target cell. In other embodiments, peptides can be conjugated to, linked to, or fused to a molecule that extends half-life or modifies the pharmacodynamic and/or pharmacokinetic properties of the peptides, or any combination thereof.

[0163] In some instances, a peptide comprises at least 1, at least 2, at least 3, at least 4, at least 5, at least 6, at least 7, at least 8, at least 9, at least 10, at least 11, at least 12, at least 13, at least 14, at least 15, at least 16, at least 17, at least 18, at least 19, or at least 20 positively charged residues, such as Arg or Lys, or any combination thereof. In some instances, one or more lysine residues in the peptide are replaced with arginine residues. In some embodiments, peptides comprise one or more Arg patches. In some embodiments, 1 or more, 2 or more, 3 or more, 4 or more, 5 or more, 6 or more, 7 or more, 8 or more, 9 or more, or 10 or more Arg or Lys residues are solvent exposed on a peptide. In some instances, a peptide comprises at least 1, at least 2, at least 3, at least 4, at least 5, at least 6, at least 7, at least 8, at least 9, at least 10, at least 11, at least 12, at least 13, at least 14, at least 15, at least 16, at least 17, at least 18, at least 19, or at least 20 histidine residues.

[0164] The peptides of the present disclosure can further comprise neutral amino acid residues. In some embodiments, the peptide has 35 or fewer neutral amino acid residues. In other embodiments, the peptide has 81 or fewer neutral amino acid residues, 70 or fewer neutral amino acid residues, 60 or fewer neutral amino acid residues, 50 or fewer neutral amino acid residues, 40 or fewer neutral amino acid residues, 36 or fewer neutral amino acid residues, 33 or fewer neutral amino acid residues, 30 or fewer neutral amino acid residues, 25 or fewer neutral amino acid residues, or 10 or fewer neutral amino acid residues.

[0165] The peptides of the present disclosure can further comprise negative amino acid residues. In some embodiments the peptide has 6 or fewer negative amino acid residues, 5 or fewer negative amino acid residues, 4 or fewer negative amino acid residues, 3 or fewer negative amino acid residues, 2 or fewer negative amino acid residues, or 1 or fewer negative amino acid residues. While negative amino acid residues can be selected from any negatively charged amino acid residues, in some embodiments, the negative amino acid residues are either E, or D, or a combination of both E and D.

[0166] In some embodiments of the present disclosure, a three-dimensional or tertiary structure of a peptide is primarily comprised of beta-sheets and/or alpha-helix structures. In some embodiments, designed or engineered TfR-binding peptides or target-binding of the present disclosure are small, compact peptides or polypeptides stabilized by intra-chain disulfide bonds (e.g., mediated by cysteines) to form cystine and a hydrophobic core. In some embodiments, engineered TfR-binding peptides have structures comprising helical bundles with at least one disulfide bridge between each of the alpha helices, thereby stabilizing the peptides. In other embodiments, the engineered TfR-binding peptides or target-binding peptides comprise structures with three alpha helices and three intra-chain disulfide bonds, one between each of the three alpha helices in the bundle of alpha helices.

### Receptor-Binding Peptides

[0167] Disclosed herein are peptide sequences, such as those listed in TABLE 1 and TABLE 2, capable of binding to a receptor (e.g., a transferrin receptor or programmed death-ligand 1). The peptide capable of binding a receptor may be referred to as a receptor-binding peptide. In some embodiments, a receptor-binding peptide may bind to a recycled receptor that undergoes recycling via a recycling pathway. The recycled receptor may be endocytosed into an early endosome and packaged into a recycling endosome prior to maturation of the early endosome into a late endosome. The recycling endosome containing the recycled receptor may fuse with a cell membrane and return the recycled receptor to the cell surface. In some embodiments, a receptor-binding peptide of the present disclosure may remain bound to the receptor during the recycling process, thereby recycling the receptor-binding peptide as well. Examples of recycled receptors that may be targeted by a receptor-binding peptide include transferrin receptor and programmed death-ligand 1. In some embodiments, a receptor-binding peptide of the present disclosure may comprise a miniprotein, a nanobody, an antibody, an IgG, an antibody fragment, a Fab, a F(ab)2, an scFv, an (scFv)2, a DARPin, or an affibody. In some embodiments, the receptor-binding peptide may comprise a cystine-dense peptide, an affitin, an adnectin, an avimer, a Kunitz domain, a nanofittin, a fynomer, a bicyclic peptide, a beta-hairpin, or a stapled peptide.

[0168] In some embodiments, a receptor-binding peptide of the present disclosure can bind to the receptor (e.g., a recycled receptor) with an affinity that is pH-independent. For example, a receptor-binding peptide can bind the receptor at an extracellular pH (about pH 7.4) with an affinity that is substantially the same the binding affinity at an endocytic pH (such as about pH 5.5 or about pH 6.5). In some embodiments, a receptor-binding peptide can bind the receptor at an extracellular pH (about pH 7.4) with an affinity that is lower than the binding affinity at an endocytic pH (such as about pH 5.5 or about pH 6.5). In some embodiments, a receptor-binding peptide can bind the receptor at an extracellular pH (about pH 7.4) with an affinity that is higher than the binding affinity at an endocytic pH (such as about pH 5.5 or about pH 6.5). In some embodiments, the binding affinity of a receptor-binding peptide for the receptor at extracellular pH (about pH 7.4) and the binding affinity of a receptor-binding peptide for the receptor at endocytic pH (about pH 5.5) can differ by no more than about 1%, no more than about 2%, no more than about 3%, no more than about 4%, no more than about 5%, no more than about 6%, no more than about 7%, no more than about 8%, no more than about 9%, no more than about 10%, no more than about 12%, no more than about 15%, no more than about 17%, no more than about 20%, no more than about 25%, no more than about 30%, no more than about 35%, no more than about 40%, no more than about 45%, or no more than about 50%. In some embodiments, the affinity of the receptor-binding peptide for the receptor at pH 7.4 and at pH 5.5 can differ by no more than 2-fold, no more than 5-fold, no more than 10-fold, no more than 15-fold, no more than 20-fold, no more than 25-fold, no more than 30-fold, no more than 40-fold, or no more than 50-fold. In some embodiments, a receptor-binding peptide (e.g., any one of SEQ ID NO: 96, SEQ ID NO: 65-SEQ ID NO: 95, SEQ ID NO: 97-SEQ ID NO: 128, SEQ ID NO: 220-SEQ ID NO: 222, SEQ ID NO: 1-SEQ ID NO: 64, SEQ ID NO: 187, SEQ ID NO: 233-SEQ ID NO: 239, SEQ ID NO: 400-SEQ ID NO: 456, or SEQ ID NO: 241) can be modified to remove one or more histidine amino acids in the TfR binding interface, thereby reducing the pH-dependence of the binding affinity of the receptor-binding peptide for the receptor. In some embodiments, a receptor-binding peptide (e.g., any one of SEQ ID NO: 96, SEQ ID NO: 65-SEQ ID NO: 95, SEQ ID NO: 97-SEQ ID NO: 128, SEQ ID NO: 220-SEQ ID NO: 222, SEQ ID NO: 1-SEQ ID NO: 64, SEQ ID NO: 187, SEQ ID NO: 233-SEQ ID NO: 239, SEQ ID NO: 400-SEQ ID NO: 456, or SEQ ID NO: 241) can lack histidine amino acids in the receptor-binding interface.

[0169] In some embodiments, a receptor-binding peptide with pH-independent binding can bind to the receptor with a dissociation constant (K_{D}) of less than 50 μM, less than 5 μM, less than 500 nM, less than 100 nM, less than 40 nM, less than 30 nM, less than 20 nM, less than 10 nM, less than 5 nM, less than 2 nM, less than 1 nM, less than 0.5 nM, less than 0.4 nM, less than 0.3 nM, less than 0.2 nM, or less than 0.1 nM at extracellular pH (about pH 7.4). In some embodiments, a receptor-binding peptide with pH-independent binding can bind to the receptor with a dissociation constant (K_{D}) of less than 50 μM, less than 5 μM, less than 500 nM, less than 100 nM, less than 40 nM, less than 30 nM, less than 20 nM, less than 10 nM, less than 5 nM, less than 2 nM, less than 1 nM, less than 0.5 nM, less than 0.4 nM, less than 0.3 nM, less than 0.2 nM, or less than 0.1 nM at endosomal pH (about pH 5.5).

[0170] In some embodiments, the receptor-binding peptide can bind to the receptor with an affinity that is pH-dependent. For example, the receptor-binding molecule can bind to the receptor with higher affinity at extracellular pH (about pH 7.4) and with lower affinity at endosomal pH (about pH 5.5), thereby releasing the selective depletion complex from receptor upon internalization and acidification of the endosomal compartment.

[0171] In some embodiments, the recycling receptor may be TfR. A peptide capable of binding transferrin receptor (TfR) may bind TfR or any of the known TfR homologs, including TfR1, TfR2, soluble TfR, or any combination or fragment (e.g., ectodomain) thereof. A peptide capable of binding a transferrin receptor or a TfR homolog can be referred to herein as a transferrin receptor-binding peptide or a TfR-binding peptide. In some embodiments, peptides disclosed herein can penetrate, cross, or enter target cells in a TfR-mediated manner. These cell layers or cells can include TfR-expressing endothelial cells, epithelial cells, and TfR-expressing cells of various tissues or organs such as tumor cells, brain cells, cancerous or tumor cells, liver cells (e.g., hepatocytes (HCs), bepatic stellate cells (HSCs), Kupffer cells (KCs), or liver sinusoidal endothelial cells (LSECs)), pancreas cells, colon cells, ovarian cells, breast cells, spleen cells, bone marrow cells, and/or lung cells, or any combination thereof. In some embodiments, a TfR-binding peptide of the present disclosure may comprise a miniprotein, a nanobody, an antibody, an IgG, an antibody fragment, a Fab, a F(ab)2, an scFv, an (scFv)2, a DARPin, or an affibody. In some embodiments, the TfR-binding peptide may comprise a cystine-dense peptide, an affitin, an adnectin, an avimer, a Kunitz domain, a nanofittin, a fynomer, a bicyclic peptide, a beta-hairpin, or a stapled peptide.

[0172] In some embodiments, the peptides as discloses herein can cross cellular layers or barriers (e.g., BBB) or cell membranes via, for example, TfR-mediated vesicular transcytosis and TfR-mediated endocytosis, respectively. In addition to binding TfR and promote transcytosis and/or endocytosis, the peptides of the present disclosure can also bind to additional target proteins on cells such as cancer cells. In some cases, a peptide is a peptide or peptide complex comprising a TfR-binding peptide conjugated to, linked to, or fused to a targeting moiety or an active agent (e.g., a therapeutic or diagnostic agent) such as a small molecule or a peptide that has an affinity for an additional target protein (e.g., receptor or enzyme). In some cases, the TfR-binding peptide is linked to a target-binding peptide and enables or promotes TfR-mediated transcytosis of the target-binding peptide across the BBB or TfR-mediated endocytosis into a cell. In some instances, and subsequent to transcytosis, a peptide complex comprising the TfR-binding peptide and a target-binding peptide can target a specific cell or tissue in the CNS and exert a biological effect (e.g., binding a target protein) upon reaching said cell or tissue. In some cases, a peptide complex of the present disclosure exerts a biological effect that is mediated by the TfR-binding peptide, the target-binding peptide, an active agent, or a combination thereof. In some cases, a TfR-binding peptide complex of the present disclosure comprising one target-binding peptides can transport and/or deliver target molecules into cells that express TfR (e.g., deliver target molecules into endosomes). In some cases, the TfR-binding peptide accumulates in tissues in the CNS. In some cases, off-target effects are reduced due to CNS-specific accumulation. In some cases, the TfR-binding peptide accumulates in tissue outside of the CNS (e.g., liver, kidney, spleen, or skin). In some cases, the cells expressing TfR are tumor cells and the TfR-binding peptide complex delivers anti-tumor agents to these tumor cells. In some cases, the anti-tumor agents alone show no or only very limited therapeutic efficacy against the tumor cells; however, when the anti-tumor agents are combined with the TfR-binding peptides of the present disclosure as, for example, a peptide complex, the therapeutic efficacy of these anti-tumor agents is significantly improved.

[0173] In some embodiments, the TfR-binding peptides of the present disclosure (e.g., SEQ ID NO: 96, SEQ ID NO: 65-SEQ ID NO: 95, SEQ ID NO: 97-SEQ ID NO: 128, SEQ ID NO: 220-SEQ ID NO: 222, and SEQ ID NO: 1-SEQ ID NO: 64) can induce a biologically relevant response. For example, a TfR-binding peptide conjugated to a target-binding peptide can selectively deplete a soluble target molecule or a cell surface target molecule. In some embodiments, the biologically relevant response can be induced after intravenous, subcutaneous, peritoneal, intracranial, or intramuscular dose, and in some embodiments, after a single intravenous, subcutaneous, peritoneal, intracranial, or intramuscular dose. In some embodiments, the TfR-binding peptides can be used in combination with various other classes of therapeutic compounds used to treat and/or prevent pain, neuropathic pain or other neurological disorders such as neurodegenerative disorders, infectious diseases, immunological disorders (e.g., autoimmune diseases) or lysosomal storage diseases. Binding of the herein described peptides and peptide complexes (e.g., peptide conjugates, fusion peptides, or recombinantly produced peptide complexes) to TfR and subsequent transport across a cell layer or barrier such as the BBB (e.g., via TfR-mediated vesicular transcytosis) or a cell membrane (e.g., via TfR-mediated endocytosis) can have implications in a number of diseases, conditions, or disorders associated with over-expression or accumulation of a target molecule (e.g., cancer, neurodegeneration, or lysosomal storage diseases) or diseases associated with mutations (e.g., mutations causing constitutive activity, resistance to treatment, or dominant negative activity) in soluble or surface proteins in a subject (e.g., a human).

[0174] Binding of the herein described peptides and peptide complexes (e.g., peptide conjugates, fusion peptides, or recombinantly produced peptide complexes) to TfR and subsequent transport across a cell layer or barrier such as the BBB (e.g., via vesicular transcytosis) or a cell membrane (e.g., via endocytosis) can have implications in a number of diseases, conditions, or disorders associated with neurodegeneration. Neurodegenerative diseases that can treated, prevented, or diagnosed with the herein described selective depletion complexes comprising TfR-binding peptides can include Alzheimer's disease, Amyotrophic lateral sclerosis, Friedreich's ataxia, Huntington's disease, Lewy body disease, Parkinson's disease, Spinal muscular atrophy, Motor neuron disease, Lyme disease, Ataxia-telangiectasia, Autosomal dominant cerebellar ataxia, Batten disease, Corticobasal syndrome, Creutzfeldt-Jakob disease, Fragile X-associated tremor/ataxia syndrome, Kufor-Rakeb syndrome, Machado-Joseph disease, multiple sclerosis, chronic traumatic encephalopathy, or frontotemporal dementia.

[0175] In some embodiments, TfR-binding peptides of the present disclosure can bind to any of the known TfR homologs, including TfR1, TfR2, soluble TfR, or any combination or fragment (e.g., ectodomain) thereof. Thus, as used herein, “TfR” can refer to any known homolog, derivative, fragment, or member of the TfR family including TfR1, TfR2, and a soluble TfR. In other embodiments, peptides are capable of binding to one, one or more, or all TfR homologs. In some embodiments, peptides of the present disclosure can bind to a TfR and promote a particular biological effect such as vesicular transcytosis. In some embodiments, TfR-binding peptides of the present disclosure, including peptides and peptide complexes with amino acid sequences set forth in SEQ ID NO: 96, SEQ ID NO: 65-SEQ ID NO: 95, SEQ ID NO: 97-SEQ ID NO: 128, SEQ ID NO: 220-SEQ ID NO: 222, and SEQ ID NO: 1-SEQ ID NO: 64, and any derivatives or variant thereof, prevent or decrease the binding of endogenous TfR binders (e.g., transferrin or any derivatives such as apo-transferrin or holo-transferrin) to TfR. In some embodiments, peptides or peptide complexes of the present disclosure comprise derivatives and variants with at least 40% homology, at least 50% homology, at least 60% homology, at least 70% homology, at least 75% homology, at least 80% homology, at least 85% homology, at least 90% homology, at least 91% homology, at least 92% homology, at least 93% homology, at least 94% homology, at least 95% homology, at least 96% homology, at least 97% homology, at least 98% homology, or at least 99% homology or at least 100% homology to amino acid sequences set forth in SEQ ID NO: 96, SEQ ID NO: 65-SEQ ID NO: 95, SEQ ID NO: 97-SEQ ID NO: 128, SEQ ID NO: 220-SEQ ID NO: 222, and SEQ ID NO: 1-SEQ ID NO: 64.

[0176] In various embodiments, the interface residues of the TfR-binding peptides of the present disclosure (e.g., those amino acid residues that interact with TfR for receptor binding) can be divided between two largely helical domains of the peptide. In some cases, the interface residues can comprise residues corresponding to residues 5-25 (e.g., and comprising corresponding residues G5, A7, S8, M11, N14, L17, E18, and E21), with reference to SEQ ID NO: 32, or corresponding to residues 35-51 (e.g., and comprising corresponding residues L38, L41, L42, L45, D46, H47, H49, S50, and Q51), with reference to SEQ ID NO: 32, or both. For example, the interface residues can comprise residues corresponding to residues 5-25 (e.g., and comprising corresponding residues G5, A7, S8, M11, N14, L17, E18, and E21), with reference to SEQ ID NO: 32, or corresponding to residues 35-51 (e.g., and comprising corresponding residues L38, L41, L42, L45, D46, H47, H49, S50, and Q51), with reference to SEQ ID NO: 32. In some embodiments, a TfR-binding peptide can comprise a fragment of a peptide provided herein, wherein the fragment comprises the minimum interface residues for binding, for example residues corresponding to residues 5-25 (e.g., and comprising corresponding residues G5, A7, S8, M11, N14, L17, E18, and E21), with reference to SEQ ID NO: 32, or corresponding to residues 35-51 (e.g., and comprising corresponding residues L38, L41, L42, L45, D46, H47, H49, S50, and Q51), with reference to SEQ ID NO: 32. In some cases, the TfR-binding peptide is a peptide having the sequence set forth in SEQ ID NO: 32 comprising the TfR-binding residues corresponding to residues G5, A7, S8, M11, N14, L17, E18, and E21 of the domain and corresponding to residues L38, L41, L42, L45, D46, H47, H49, S50, and Q51 of the second domain, with reference to SEQ ID NO: 32.

[0177] In some embodiments, TfR-binding peptides bind to TfR with equal, similar, or greater affinity (e.g., lower dissociation constant K_{D}) as compared to endogenous molecules (e.g., transferrin, holotransferrin (iron-bound transferrin), apotransferrin (transferrin not bound to iron), or any other endogenous TfR ligands) or other exogenous molecules. In some embodiments, the peptide can have a K_{D} of less than 50 μM, less than 5 μM, less than 500 nM, less than 100 nM, less than 40 nM, less than 30 nM, less than 20 nM, less than 10 nM, less than 5 nM, less than 2 nM, less than 1 nM, less than 0.5 nM, less than 0.4 nM, less than 0.3 nM, less than 0.2 nM, or less than 0.1 nM. In some embodiments, peptide transport by TfR is improved by having a lower affinity (e.g., a higher dissociation constant K_{D}) as compared to endogenous molecules. In some embodiments, peptide transport by TfR is improved by having a faster off rate or higher k_{off} than endogenous molecules. In some embodiments, the off rate or k_{off} is similar to that of transferrin. In some embodiments, peptide transport is improved by having a faster on rate or a higher kₒₙ, optionally such as higher than that of transferrin. In other embodiments, one or more conserved residues at the transferrin (Tf)-TfR-binding interface are also present in the amino acid sequences of the peptides described herein. In some embodiments, a TfR-binding peptide has an off rate that is slower than the recycling rate of TfR, such that the TfR-binding peptide is likely to remain bound to TfR during the recycling process. In some embodiments, the TfR-binding peptide may have an off rate that is no faster than 1 minute, no faster than 2 minutes, no faster than 3 minutes, no faster than 4 minutes, no faster than 5 minutes, no faster than 7 minutes, no faster than 10 minutes, no faster than 15 minutes, or no faster than 20 minutes. In some embodiments, the TfR-binding peptide may have an off rate that is from about 1 minute to about 20 minutes, from about 2 minutes to about 15 minutes, from about 2 minutes to about 10 minutes, or from about 5 minutes to about 10 minutes.

[0178] In some embodiments, TfR-binding peptides that exhibit an improved TfR receptor binding show improved transcytosis function, improved endocytosis function, improved recycling, or combinations thereof. In some embodiments, TfR-binding peptides that exhibit an improved TfR receptor binding show no or small changes in transcytosis function, endocytosis function, recycling, or combinations thereof. In some embodiments, TfR-binding peptides that exhibit an improved TfR receptor binding show reduced transcytosis function, reduced endocytosis function, reduced recycling, or combinations thereof. In some embodiments, the TfR-binding peptide binds at a site of high homology between human and murine TfR, including one or more, or all, of the amino acid domains corresponding to residues 506-510, 523-531, and 611-662 of the human TfR (SEQ ID NO: 190, MMDQARSAFSNLFGGEPLSYTRFSLARQVDGDNSHVEMKLAVDEEENADNNTKANVT KPKRCSGSICYGTIAVIVFFLIGFMIGYLGYCKGVEPKTECERLAGTESPVREEPGEDFPA ARRLYWDDLKRKLSEKLDSTDFTGTIKLLNENSYVPREAGSQKDENLALYVENQFREF KLSKVWRDQHFVKIQVKDSAQNSVIIVDKNGRLVYLVENPGGYVAYSKAATVTGKLV HANFGTKKDFEDLYTPVNGSIVIVRAGKITFAEKVANAESLNAIGVLIYMDQTKFPIVNA ELSFFGHAHLGTGDPYTPGFPSFNHTQFPPSRSSGLPNIPVQTISRAAAEKLFGNMEGDCP SDWKTDSTCRMVTSESKNVKLTVSNVLKEIKILNIFGVIKGFVEPDHYVVVGAQRDAW GPGAAKSGVGTALLLKLAQMFSDMVLKDGFQPSRSIIFASWSAGDFGSVGATEWLEGY LSSLHLKAFTYINLDKAVLGTSNFKVSASPLLYTLIEKTMQNVKHPVTGQFLYQDSNWA SKVEKLTLDNAAFPFLAYSGIPAVSFCFCEDTDYPYLGTTMDTYKELIERIPELNKVARA AAEVAGQFVIKLTHDVELNLDYERYNSQLLSFVRDLNQYRADIKEMGLSLQWLYSARG DFFRATSRLTTDFGNAEKTDRFVMKKLNDRVMRVEYHFLSPYVSPKESPFRHVFWGSG SHTLPALLENLKLRKQNNGAFNETLFRNQLALATWTIQGAANALSGDVWDIDNEF). In some embodiments, the regions of TfR to which the peptides disclosed herein or variants thereof bind all or in part to such TfR domains. In some embodiments, the peptides disclosed herein bind to any one, any two, or all three of the TfR regions of high homology including the amino acid domains corresponding to residues 506-510, 523-531, and 611-662 of the human TfR (SEQ ID NO: 190). In some embodiments the peptides disclosed herein bind at least to the domain corresponding to residues 611-662 of the human TfR.

[0179] In some embodiments, the K_{A} and K_{D} values of a TfR-binding peptide can be modulated and optimized (e.g., via amino acid substitutions) to provide an optimal ratio of TfR-binding affinity and efficient transcytosis function.

[0180] In some embodiments, peptides disclosed herein or variants thereof bind to TfR at residues found in the binding interface (e.g., the binding domain or the binding pocket) of TfR with other exogenous or endogenous ligands (e.g., transferrin (Tf), Tf derivatives, or Tf-like peptides or proteins). In some embodiments, a peptide disclosed herein or a variant thereof, which binds to TfR, comprises at least 70% homology, at least 75% homology, at least 80% homology, at least 85% homology, at least 90% homology, at least 95% homology, at least 96% homology, at least 97% homology, at least 98% homology, or at least 99% homology or at least 100% homology to a sequence that binds residues of TfR, which makeup the binding pocket. In some embodiments, a peptide disclosed herein or a variant thereof, which binds to TfR, comprises at least 70% homology, at least 75% homology, at least 80% homology, at least 85% homology, at least 90% homology, at least 95% homology, at least 96% homology, at least 97% homology, at least 98% homology, or at least 99% homology or at least 100% homology to an endogenous or exogenous polypeptide known to bind TfR, for example, endogenous Transferrin or any one of the peptides listed in TABLE 1. In other embodiments, a peptide described herein binds to a protein of interest, which comprises at least 70% homology, at least 75% homology, at least 80% homology, at least 85% homology, at least 90% homology, at least 95% homology, at least 96% homology, at least 97% homology, at least 98% homology, or at least 99% homology or at least 100% homology to TfR, a fragment, homolog, or a variant thereof.

[0181] In some embodiments, peptides disclosed herein or variants thereof bind regions of TfR that comprise the amino acid residues corresponding to residues 506-510, 523-531, and 611-662 (the numbering of these amino acid residues is based on the following Uniprot reference protein sequence of endogenous human TFRC UniProtKB—P02786 (SEQ ID NO: 190, TFR1_HUMAN)). In some embodiments, the regions of TfR to which the peptides disclosed herein or variants thereof bind overlap with those of Tf, a fragment, homolog, or a variant thereof.

[0182] In other embodiments, a nucleic acid, vector, plasmid, or donor DNA comprises a sequence that encodes a peptide, peptide construct, a peptide complex, or variant or functional fragment thereof, as described in the present disclosure. In further embodiments, certain parts or fragments of TfR-binding motifs (e.g., conserved binding motifs) can be grafted onto a peptide or peptide complex with a sequence of any one of SEQ ID NO: 96, SEQ ID NO: 65-SEQ ID NO: 95, SEQ ID NO: 97-SEQ ID NO: 128, SEQ ID NO: 220-SEQ ID NO: 222, or SEQ ID NO: 1-SEQ ID NO: 64. In some embodiments, peptides can cause TfR to be degraded, prevent TfR from localizing to a cell's nucleus, or prevent TfR from interacting with transferrin or transferrin-like proteins.

[0183] In some embodiments, a peptide can be selected for further testing or use based upon its ability to bind to the certain amino acid residue or motif of amino acid residues. The certain amino acid residue or motif of amino acid residues in TfR can be identified an amino acid residue or sequence of amino acid residues that are involved in the binding of TfR to Tf. A certain amino acid residue or motif of amino acid residues can be identified from a crystal structure of the TfR:Tf complex. In some embodiments, peptides (e.g., CDPs) demonstrate the resistance to heat, protease (pepsin), and reduction.

[0184] The peptides, peptide complexes (e.g., peptide conjugates or fusion peptides), and selective delivery complexes comprising one or more of the amino acid sequences set forth in SEQ ID NO: 96, SEQ ID NO: 65-SEQ ID NO: 95, SEQ ID NO: 97-SEQ ID NO: 128, SEQ ID NO: 220-SEQ ID NO: 222, or SEQ ID NO: 1-SEQ ID NO: 64 can bind to a protein of interest. In some embodiments, the protein of interest is a TfR. In some embodiments, the peptides and peptide complexes (e.g., peptide conjugates or fusion peptides) that bind to a TfR comprise at least one of the amino acid sequences set forth in SEQ ID NO: 96, SEQ ID NO: 65-SEQ ID NO: 95, SEQ ID NO: 97-SEQ ID NO: 128, SEQ ID NO: 220-SEQ ID NO: 222, or SEQ ID NO: 1-SEQ ID NO: 64. In some embodiments, peptides, peptide complexes (e.g., peptide conjugates and fusion molecules) of the present disclosure that bind to a TfR comprise peptide derivatives or variants having at least 70% homology, at least 75% homology, at least 80% homology, at least 85% homology, at least 90% homology, at least 95% homology, at least 96% homology, at least 97% homology, at least 98% homology, or at least 99% homology or at least 100% homology to amino acid sequences set forth in SEQ ID NO: 96, SEQ ID NO: 65-SEQ ID NO: 95, SEQ ID NO: 97-SEQ ID NO: 128, SEQ ID NO: 220-SEQ ID NOD 222, or SEQ ID NO: 1-SEQ ID NO: 64. For example, peptides or peptide complexes (e.g., peptide conjugates and fusion molecules) of the present disclosure that bind to a TfR can comprise peptide derivatives or variants having at least 70% homology, at least 75% homology, at least 80% homology, at least 85% homology, at least 90% homology, at least 95% homology, at least 96% homology, at least 97% homology, at least 98% homology, or at least 99% homology or at least 100% homology to the amino acid sequence set forth in SEQ ID NO: 96.

[0185] TABLE 1 lists exemplary peptide sequences according to the methods and compositions of the present disclosure.

TABLE 1
Exemplary TfR-Binding Peptide Sequences

| SEQ ID NO | Amino Acid Sequence |
|---|---|
| SEQ ID NO: 96 | REGCASRCMKYNDELEKCEARMMSMSNTEEDCEQELEDLLYCLDHCHSQ |
| SEQ ID NO: 65 | REGCASRCTKYNAELEKCEARVSSMSNTEETCVQELFDLLHCVDHCVSQ |
| SEQ ID NO: 66 | REGCASRCTKYNAELEKCEARVMSMSNTEEDCEQELEDLLHCLDHCHSQ |
| SEQ ID NO: 67 | REGCASRCTKYNAELEKCEARVVSMSNTEEDCEQELEDLLHCLDHCHSQ |
| SEQ ID NO: 68 | REGCASRCTKYNAELEKCEARVMSMSNTEETCEQELEDLLHCLDHCHSQ |
| SEQ ID NO: 69 | REGCASRCTKYNAELEKCEARVMSMSNTEEDCVQELEDLLHCLDHCHSQ |
| SEQ ID NO: 70 | REGCASRCTKYNAELEKCEARVMSMSNTEEDCEQELFDLLHCLDHCHSQ |
| SEQ ID NO: 71 | REGCASRCTKYNAELEKCEARVMSMSNTEEDCEQELEDLLHCVDHCHSQ |
| SEQ ID NO: 72 | REGCASRCTKYNAELEKCEARVMSMSNTEEDCEQELEDLLHCLDHCVSQ |
| SEQ ID NO: 73 | REGCASRCTKYNAELEKCEARVVSMSNTEETCEQELEDLLHCLDHCHSQ |
| SEQ ID NO: 74 | REGCASRCTKYNAELEKCEARVVSMSNTEEDCVQELEDLLHCLDHCHSQ |
| SEQ ID NO: 75 | REGCASRCTKYNAELEKCEARVVSMSNTEEDCEQELFDLLHCLDHCHSQ |
| SEQ ID NO: 76 | REGCASRCTKYNAELEKCEARVVSMSNTEEDCEQELEDLLHCVDHCHSQ |
| SEQ ID NO: 77 | REGCASRCTKYNAELEKCEARVVSMSNTEEDCEQELEDLLHCLDHCVSQ |
| SEQ ID NO: 78 | REGCASRCTKYNAELEKCEARVMSMSNTEETCVQELEDLLHCLDHCHSQ |
| SEQ ID NO: 79 | REGCASRCTKYNAELEKCEARVMSMSNTEETCEQELFDLLHCLDHCHSQ |
| SEQ ID NO: 80 | REGCASRCTKYNAELEKCEARVMSMSNTEETCEQELEDLLHCVDHCHSQ |
| SEQ ID NO: 81 | REGCASRCTKYNAELEKCEARVMSMSNTEETCEQELEDLLHCLDHCVSQ |
| SEQ ID NO: 82 | REGCASRCTKYNAELEKCEARVMSMSNTEEDCVQELFDLLHCLDHCHSQ |
| SEQ ID NO: 83 | REGCASRCTKYNAELEKCEARVMSMSNTEEDCVQELEDLLHCVDHCHSQ |
| SEQ ID NO: 84 | REGCASRCTKYNAELEKCEARVMSMSNTEEDCVQELEDLLHCLDHCVSQ |
| SEQ ID NO: 85 | REGCASRCTKYNAELEKCEARVMSMSNTEEDCEQELFDLLHCVDHCHSQ |
| SEQ ID NO: 86 | REGCASRCTKYNAELEKCEARVMSMSNTEEDCEQELFDLLHCLDHCVSQ |
| SEQ ID NO: 87 | REGCASRCTKYNAELEKCEARVMSMSNTEEDCEQELEDLLHCVDHCVSQ |
| SEQ ID NO: 88 | REGCASRCMKYNAELEKCEARVMSMSNTEEDCEQELEDLLHCLDHCHSQ |
| SEQ ID NO: 89 | REGCASRCTKYNDELEKCEARVMSMSNTEEDCEQELEDLLHCLDHCHSQ |
| SEQ ID NO: 90 | REGCASRCTKYNAELEKCEARMMSMSNTEEDCEQELEDLLHCLDHCHSQ |
| SEQ ID NO: 91 | REGCASRCTKYNAELEKCEARVMSMSNTEEDCEQELEDLLYCLDHCHSQ |
| SEQ ID NO: 92 | REGCASRCMKYNDELEKCEARMMSMSNTEEDCEQELEDLLHCLDHCHSQ |
| SEQ ID NO: 93 | REGCASRCMKYNDELEKCEARVMSMSNTEEDCEQELEDLLYCLDHCHSQ |
| SEQ ID NO: 94 | REGCASRCMKYNAELEKCEARMMSMSNTEEDCEQELEDLLYCLDHCHSQ |
| SEQ ID NO: 95 | REGCASRCTKYNDELEKCEARMMSMSNTEEDCEQELEDLLYCLDHCHSQ |
| SEQ ID NO: 97 | REGCASRCTRYNAELERCEARVSSMSNTEETCVQELFDLLHCVDHCVSQ |
| SEQ ID NO: 98 | REGCASRCTRYNAELERCEARVMSMSNTEEDCEQELEDLLHCLDHCHSQ |
| SEQ ID NO: 99 | REGCASRCTRYNAELERCEARVVSMSNTEEDCEQELEDLLHCLDHCHSQ |
| SEQ ID NO: 100 | REGCASRCTRYNAELERCEARVMSMSNTEETCEQELEDLLHCLDHCHSQ |
| SEQ ID NO: 101 | REGCASRCTRYNAELERCEARVMSMSNTEEDCVQELEDLLHCLDHCHSQ |
| SEQ ID NO: 102 | REGCASRCTRYNAELERCEARVMSMSNTEEDCEQELFDLLHCLDHCHSQ |
| SEQ ID NO: 103 | REGCASRCTRYNAELERCEARVMSMSNTEEDCEQELEDLLHCVDHCHSQ |
| SEQ ID NO: 104 | REGCASRCTRYNAELERCEARVMSMSNTEEDCEQELEDLLHCLDHCVSQ |
| SEQ ID NO: 105 | REGCASRCTRYNAELERCEARVVSMSNTEETCEQELEDLLHCLDHCHSQ |
| SEQ ID NO: 106 | REGCASRCTRYNAELERCEARVVSMSNTEEDCVQELEDLLHCLDHCHSQ |
| SEQ ID NO: 107 | REGCASRCTRYNAELERCEARVVSMSNTEEDCEQELFDLLHCLDHCHSQ |
| SEQ ID NO: 108 | REGCASRCTRYNAELERCEARVVSMSNTEEDCEQELEDLLHCVDHCHSQ |
| SEQ ID NO: 109 | REGCASRCTRYNAELERCEARVVSMSNTEEDCEQELEDLLHCLDHCVSQ |
| SEQ ID NO: 110 | REGCASRCTRYNAELERCEARVMSMSNTEETCVQELEDLLHCLDHCHSQ |
| SEQ ID NO: 111 | REGCASRCTRYNAELERCEARVMSMSNTEETCEQELFDLLHCLDHCHSQ |
| SEQ ID NO: 112 | REGCASRCTRYNAELERCEARVMSMSNTEETCEQELEDLLHCVDHCHSQ |
| SEQ ID NO: 113 | REGCASRCTRYNAELERCEARVMSMSNTEETCEQELEDLLHCLDHCVSQ |
| SEQ ID NO: 114 | REGCASRCTRYNAELERCEARVMSMSNTEEDCVQELFDLLHCLDHCHSQ |
| SEQ ID NO: 115 | REGCASRCTRYNAELERCEARVMSMSNTEEDCVQELEDLLHCVDHCHSQ |
| SEQ ID NO: 116 | REGCASRCTRYNAELERCEARVMSMSNTEEDCVQELEDLLHCLDHCVSQ |
| SEQ ID NO: 117 | REGCASRCTRYNAELERCEARVMSMSNTEEDCEQELFDLLHCVDHCHSQ |
| SEQ ID NO: 118 | REGCASRCTRYNAELERCEARVMSMSNTEEDCEQELFDLLHCLDHCVSQ |
| SEQ ID NO: 119 | REGCASRCTRYNAELERCEARVMSMSNTEEDCEQELEDLLHCVDHCVSQ |
| SEQ ID NO: 120 | REGCASRCMRYNAELERCEARVMSMSNTEEDCEQELEDLLHCLDHCHSQ |
| SEQ ID NO: 121 | REGCASRCTRYNDELERCEARVMSMSNTEEDCEQELEDLLHCLDHCHSQ |
| SEQ ID NO: 122 | REGCASRCTRYNAELERCEARMMSMSNTEEDCEQELEDLLHCLDHCHSQ |
| SEQ ID NO: 123 | REGCASRCTRYNAELERCEARVMSMSNTEEDCEQELEDLLYCLDHCHSQ |
| SEQ ID NO: 124 | REGCASRCMRYNDELERCEARMMSMSNTEEDCEQELEDLLHCLDHCHSQ |
| SEQ ID NO: 125 | REGCASRCMRYNDELERCEARVMSMSNTEEDCEQELEDLLYCLDHCHSQ |
| SEQ ID NO: 126 | REGCASRCMRYNAELERCEARMMSMSNTEEDCEQELEDLLYCLDHCHSQ |
| SEQ ID NO: 127 | REGCASRCTRYNDELERCEARMMSMSNTEEDCEQELEDLLYCLDHCHSQ |
| SEQ ID NO: 128 | REGCASRCMRYNDELERCEARMMSMSNTEEDCEQELEDLLYCLDHCHSQ |
| SEQ ID NO: 32 | GSREGCASRCMKYNDELEKCEARMMSMSNTEEDCEQELEDLLYCLDHCHSQ |
| SEQ ID NO: 1 | GSREGCASRCTKYNAELEKCEARVSSMSNTEETCVQELFDLLHCVDHCVSQ |
| SEQ ID NO: 2 | GSREGCASRCTKYNAELEKCEARVMSMSNTEEDCEQELEDLLHCLDHCHSQ |
| SEQ ID NO: 3 | GSREGCASRCTKYNAELEKCEARVVSMSNTEEDCEQELEDLLHCLDHCHSQ |
| SEQ ID NO: 4 | GSREGCASRCTKYNAELEKCEARVMSMSNTEETCEQELEDLLHCLDHCHSQ |
| SEQ ID NO: 5 | GSREGCASRCTKYNAELEKCEARVMSMSNTEEDCVQELEDLLHCLDHCHSQ |
| SEQ ID NO: 6 | GSREGCASRCTKYNAELEKCEARVMSMSNTEEDCEQELFDLLHCLDHCHSQ |
| SEQ ID NO: 7 | GSREGCASRCTKYNAELEKCEARVMSMSNTEEDCEQELEDLLHCVDHCHSQ |
| SEQ ID NO: 8 | GSREGCASRCTKYNAELEKCEARVMSMSNTEEDCEQELEDLLHCLDHCVSQ |
| SEQ ID NO: 9 | GSREGCASRCTKYNAELEKCEARVVSMSNTEETCEQELEDLLHCLDHCHSQ |
| SEQ ID NO: 10 | GSREGCASRCTKYNAELEKCEARVVSMSNTEEDCVQELEDLLHCLDHCHSQ |
| SEQ ID NO: 11 | GSREGCASRCTKYNAELEKCEARVVSMSNTEEDCEQELFDLLHCLDHCHSQ |
| SEQ ID NO: 12 | GSREGCASRCTKYNAELEKCEARVVSMSNTEEDCEQELEDLLHCVDHCHSQ |
| SEQ ID NO: 13 | GSREGCASRCTKYNAELEKCEARVVSMSNTEEDCEQELEDLLHCLDHCVSQ |
| SEQ ID NO: 14 | GSREGCASRCTKYNAELEKCEARVMSMSNTEETCVQELEDLLHCLDHCHSQ |
| SEQ ID NO: 15 | GSREGCASRCTKYNAELEKCEARVMSMSNTEETCEQELFDLLHCLDHCHSQ |
| SEQ ID NO: 16 | GSREGCASRCTKYNAELEKCEARVMSMSNTEETCEQELEDLLHCVDHCHSQ |
| SEQ ID NO: 17 | GSREGCASRCTKYNAELEKCEARVMSMSNTEETCEQELEDLLHCLDHCVSQ |
| SEQ ID NO: 18 | GSREGCASRCTKYNAELEKCEARVMSMSNTEEDCVQELFDLLHCLDHCHSQ |
| SEQ ID NO: 19 | GSREGCASRCTKYNAELEKCEARVMSMSNTEEDCVQELEDLLHCVDHCHSQ |
| SEQ ID NO: 20 | GSREGCASRCTKYNAELEKCEARVMSMSNTEEDCVQELEDLLHCLDHCVSQ |
| SEQ ID NO: 21 | GSREGCASRCTKYNAELEKCEARVMSMSNTEEDCEQELFDLLHCVDHCHSQ |
| SEQ ID NO: 22 | GSREGCASRCTKYNAELEKCEARVMSMSNTEEDCEQELFDLLHCLDHCVSQ |
| SEQ ID NO: 23 | GSREGCASRCTKYNAELEKCEARVMSMSNTEEDCEQELEDLLHCVDHCVSQ |
| SEQ ID NO: 24 | GSREGCASRCMKYNAELEKCEARVMSMSNTEEDCEQELEDLLHCLDHCHSQ |
| SEQ ID NO: 25 | GSREGCASRCTKYNDELEKCEARVMSMSNTEEDCEQELEDLLHCLDHCHSQ |
| SEQ ID NO: 26 | GSREGCASRCTKYNAELEKCEARMMSMSNTEEDCEQELEDLLHCLDHCHSQ |
| SEQ ID NO: 27 | GSREGCASRCTKYNAELEKCEARVMSMSNTEEDCEQELEDLLYCLDHCHSQ |
| SEQ ID NO: 28 | GSREGCASRCMKYNDELEKCEARMMSMSNTEEDCEQELEDLLHCLDHCHSQ |
| SEQ ID NO: 29 | GSREGCASRCMKYNDELEKCEARVMSMSNTEEDCEQELEDLLYCLDHCHSQ |
| SEQ ID NO: 30 | GSREGCASRCMKYNAELEKCEARMMSMSNTEEDCEQELEDLLYCLDHCHSQ |
| SEQ ID NO: 31 | GSREGCASRCTKYNDELEKCEARMMSMSNTEEDCEQELEDLLYCLDHCHSQ |
| SEQ ID NO: 33 | GSREGCASRCTRYNAELERCEARVSSMSNTEETCVQELFDLLHCVDHCVSQ |
| SEQ ID NO: 34 | GSREGCASRCTRYNAELERCEARVMSMSNTEEDCEQELEDLLHCLDHCHSQ |
| SEQ ID NO: 35 | GSREGCASRCTRYNAELERCEARVVSMSNTEEDCEQELEDLLHCLDHCHSQ |
| SEQ ID NO: 36 | GSREGCASRCTRYNAELERCEARVMSMSNTEETCEQELEDLLHCLDHCHSQ |
| SEQ ID NO: 37 | GSREGCASRCTRYNAELERCEARVMSMSNTEEDCVQELEDLLHCLDHCHSQ |
| SEQ ID NO: 38 | GSREGCASRCTRYNAELERCEARVMSMSNTEEDCEQELFDLLHCLDHCHSQ |
| SEQ ID NO: 39 | GSREGCASRCTRYNAELERCEARVMSMSNTEEDCEQELEDLLHCVDHCHSQ |
| SEQ ID NO: 40 | GSREGCASRCTRYNAELERCEARVMSMSNTEEDCEQELEDLLHCLDHCVSQ |
| SEQ ID NO: 41 | GSREGCASRCTRYNAELERCEARVVSMSNTEETCEQELEDLLHCLDHCHSQ |
| SEQ ID NO: 42 | GSREGCASRCTRYNAELERCEARVVSMSNTEEDCVQELEDLLHCLDHCHSQ |
| SEQ ID NO: 43 | GSREGCASRCTRYNAELERCEARVVSMSNTEEDCEQELFDLLHCLDHCHSQ |
| SEQ ID NO: 44 | GSREGCASRCTRYNAELERCEARVVSMSNTEEDCEQELEDLLHCVDHCHSQ |
| SEQ ID NO: 45 | GSREGCASRCTRYNAELERCEARVVSMSNTEEDCEQELEDLLHCLDHCVSQ |
| SEQ ID NO: 46 | GSREGCASRCTRYNAELERCEARVMSMSNTEETCVQELEDLLHCLDHCHSQ |
| SEQ ID NO: 47 | GSREGCASRCTRYNAELERCEARVMSMSNTEETCEQELFDLLHCLDHCHSQ |
| SEQ ID NO: 48 | GSREGCASRCTRYNAELERCEARVMSMSNTEETCEQELEDLLHCVDHCHSQ |
| SEQ ID NO: 49 | GSREGCASRCTRYNAELERCEARVMSMSNTEETCEQELEDLLHCLDHCVSQ |
| SEQ ID NO: 50 | GSREGCASRCTRYNAELERCEARVMSMSNTEEDCVQELFDLLHCLDHCHSQ |
| SEQ ID NO: 51 | GSREGCASRCTRYNAELERCEARVMSMSNTEEDCVQELEDLLHCVDHCHSQ |
| SEQ ID NO: 52 | GSREGCASRCTRYNAELERCEARVMSMSNTEEDCVQELEDLLHCLDHCVSQ |
| SEQ ID NO: 53 | GSREGCASRCTRYNAELERCEARVMSMSNTEEDCEQELFDLLHCVDHCHSQ |
| SEQ ID NO: 54 | GSREGCASRCTRYNAELERCEARVMSMSNTEEDCEQELFDLLHCLDHCVSQ |
| SEQ ID NO: 55 | GSREGCASRCTRYNAELERCEARVMSMSNTEEDCEQELEDLLHCVDHCVSQ |
| SEQ ID NO: 56 | GSREGCASRCMRYNAELERCEARVMSMSNTEEDCEQELEDLLHCLDHCHSQ |
| SEQ ID NO: 57 | GSREGCASRCTRYNDELERCEARVMSMSNTEEDCEQELEDLLHCLDHCHSQ |
| SEQ ID NO: 58 | GSREGCASRCTRYNAELERCEARMMSMSNTEEDCEQELEDLLHCLDHCHSQ |
| SEQ ID NO: 59 | GSREGCASRCTRYNAELERCEARVMSMSNTEEDCEQELEDLLYCLDHCHSQ |
| SEQ ID NO: 60 | GSREGCASRCMRYNDELERCEARMMSMSNTEEDCEQELEDLLHCLDHCHSQ |
| SEQ ID NO: 61 | GSREGCASRCMRYNDELERCEARVMSMSNTEEDCEQELEDLLYCLDHCHSQ |
| SEQ ID NO: 62 | GSREGCASRCMRYNAELERCEARMMSMSNTEEDCEQELEDLLYCLDHCHSQ |
| SEQ ID NO: 63 | GSREGCASRCTRYNDELERCEARMMSMSNTEEDCEQELEDLLYCLDHCHSQ |
| SEQ ID NO: 64 | GSREGCASRCMRYNDELERCEARMMSMSNTEEDCEQELEDLLYCLDHCHSQ |

[0186] In some embodiments, a TfR-binding peptide disclosed herein comprises GSREGCAX₁RCX₂KYX₄DEX₂X₃KCX₃ARIMIMSMSNTEEDCEQEX₂EDX₂X₂YCX₂X₃X₅CX₅X₁X₄ (SEQ ID NO: 148) or REGCAX₁RCX₂KYX₄DEX₂X₃KCX₃ARIMMSMSNTEEDCEQEX₂EDX₂X₂YCX₂X₃X₅CX₅X₁X₄ (SEQ ID NO: 167), wherein X₁ can be independently selected from S, T, D, or N, X₂ can be independently selected from A, M, I, L, or V, X₃ can be independently selected from D, E, N, Q, S, or T, X₄ can be independently selected from D, E, H, K, R, N, Q, S, or T, and X₅ can be independently selected from H, K, R, N, Q, S, or T.

[0187] In some embodiments, a TfR-binding peptide disclosed herein comprises GSREX₁CX₂X₃RCX₄KYX₅DEX₆X₇KCX₈ARMMSMSNTEEDCEQELEDLLYCLDHCHSQ (SEQ ID NO: 149) or REX₁CX₂X₃RCX₄KYX₅DEX₆X₇KCXSARMMSMSNTEEDCEQELEDLLYCLDHCHSQ (SEQ ID NO: 168), wherein X₁, X₂, X₃, X₄, X₅, X₆, X₇ and X₈ are TfR binding interface residues and can independently be any amino acid. In some embodiments, a TfR-binding peptide disclosed herein comprises GSREGCASRCMKYNDELEKCEARMMSMSNTEEDCEQEXEDX₂X₃YCX₄X₅X₆CX₇X₈X₉ (SEQ ID NO: 150) or REGCASRCMKYNDELEKCEARMMSMSNTEEDCEQEXEDX₂X₃YCX₄X₅X₆CX₇X₈X₉ (SEQ ID NO: 169), wherein X₁, X₂, X₃, X₄, X₅, X₆, X₇, X₈, and X₉ are TfR binding interface residues and can independently be any amino acid. In some embodiments, a TfR-binding peptide disclosed herein comprises GSREX₁CX₂X₃RCX₄KYX₅DEX₆X₇KCX₈ARMMSMSNTEEDCEQEX₉EDX₁₀X₁₁YCX₁₂X₁₃X₁₃CX₁₅X₁₆X₁₇ (SEQ ID NO: 151) or REX₁CX₂X₃RCX₄KYX₅DEX₆X₇KCX₈ARMMSMSNTEEDCEQEX₉EDX₁₀X₁₁YCX₁₂X₁₃X₁₃C X₁₅X₁₆X₁₇ (SEQ ID NO: 170), wherein X₁, X₂, X₃, X₄, X₅, X₆, X₇, X₈, X₉, X₁₀, X₁₁, X₁₂, X₁₃, X₁₄, X₁₅, X₁₆ and X₁₇ are TfR binding interface residues and can independently be any amino acid. In some embodiments, a TfR-binding peptide disclosed herein comprises GSREGCASRCMKYNDELEKCEARMMSMSNTEEDCEQELEDLLYCLDHCHSQ (SEQ ID NO: 32).

[0188] In some embodiments, a TfR-binding peptide disclosed herein comprises X₁X₂X₃X₄GX₅ASX₆X₇MX₈X₉NX₁₀X₁₁LEX₁₂X₁₃EX₁₄X₁₅X₁₆X₁₇X₁₈X₁₉X₂₀X₂₁X₂₂X₂₃X₂₄X₂₅X₂₆X₂₇X₂₈X₂₉X₃₀X₃₁X₃₂X₃₃X₃₄X₃₅X₃₆X₃₇X₃₈X₃₉X₄₀X₄₁X₄₂X₄₃ (SEQ ID NO: 152), wherein X₁, X₂, X₃, X₄, X₅, X₆, X₇, X₈, X₉, X₁₀, X₁₁, X₁₂, X₁₃, X₁₄, X₁₅, X₁₆, X₁₇, X₁₈, X₁₉, X₂₀, X₂₁, X₂₂, X₂₃, X₂₄, X₂₅, X₂₆, X₂₇, X₂₈, X₂₉, X₃₀, X₃₁, X₃₂, X₃₃, X₃₄, X₃₅, X₃₆, X₃₇, X₃₈, X₃₉, X₄₀, X₄₁, X₄₂, and X₄₃ can independently be any amino acid.

[0189] In some embodiments, a TfR-binding peptide disclosed herein comprises X₁X₂X₃X₄X₅X₆X₇X₈X₉X₁₀X₁₁X₁₂X₁₃X₁₄X₁₅X₁₆X₁₇X₁₈X₁₉X₂₀X₂₁X₂₂X₂₃X₂₄X₂₅X₂₆X₂₇X₂X₂₉X₃₀X₃₁X₃₂X₃₃X₃₄X₃₅X₃₆X₃₇LX₃₈X₃₉LLX₄₀X₄₁LDHX₄₂HSQ (SEQ ID NO: 153), wherein X₁, X₂, X₃, X₄, X₅, X₆, X₇, X₈, X₉, X₁₀, X₁₁, X₁₂, X₁₃, X₁₄, X₁₅, X₁₆, X₁₇, X₁₈, X₁₉, X₂₀, X₂₁, X₂₂, X₂₃, X₂₄, X₂₅, X₂₆, X₂₇, X₂₈, X₂₉, X₃₀, X₃₁, X₃₂, X₃₃, X₃₄, X₃₅, X₃₆, X₃₇, X₃₈, X₃₉, X₄₀, X₄₁, and X₄₂ can independently be any amino acid.

[0190] In some embodiments, a TfR-binding peptide disclosed herein comprises X₁X₂X₃X₄GX₅ASX₆X₇MX₈X₉NX₁₀X₁₁LEX₁₂X₁₃EX₁₄X₁₅X₁₆X₁₇X₁₈X₁₉X₂₀X₂₁X₂₂X₂₃X₂₄X₂₅X₂₆X₂₇X₂₈X₂₉LX₃₀X₃₁LLX₃₂X₃₃LDHX₃₄HSQ (SEQ ID NO: 154), wherein X₁, X₂, X₃, X₄, X₅, X₆, X₇, X₈, X₉, X₁₀, X₁₁, X₁₂, X₁₃, X₁₄, X₁₅, X₁₆, X₁₇, X₁₈, X₁₉, X₂₀, X₂₁, X₂₂, X₂₃, X₂₄, X₂₅, X₂₆, X₂₇, X₂₈, X₂₉, X₃₀, X₃₁, X₃₂, X₃₃, and X₃₄ can independently be any amino acid.

[0191] In some embodiments, a TfR-binding peptide or peptide complex disclosed herein comprises at least 60%, at least 65%, at least 70%, at least 75%, at least 80%, at least 85%, at least 90%, at least 91%, at least 92%, at least 93%, at least 94%, at least 95%, at least 96%, at least 97%, at least 98%, at least 99%, or at least 100% sequence homology to any one of SEQ ID NO: 96, SEQ ID NO: 65-SEQ ID NO: 95, SEQ ID NO: 97-SEQ ID NO: 128, SEQ ID NO: 220-SEQ ID NO: 222, or SEQ ID NO: 1-SEQ ID NO: 64, or any variant, homolog, or functional fragment thereof. In some embodiments, a TfR-binding peptide or peptide complex disclosed herein comprises any one of SEQ ID NO: 96, SEQ ID NO: 65-SEQ ID NO: 95, SEQ ID NO: 97-SEQ ID NO: 128, SEQ ID NO: 220-SEQ ID NO: 222, or SEQ ID NO: 1-SEQ ID NO: 64, or any variant, homolog, or functional fragment thereof. In some embodiments, a peptide that binds to a TfR comprises the amino acid sequence set forth in SEQ ID NO: 32.

[0192] In some embodiments, a TfR-binding peptide comprises canonical amino acid residues as surface interface residues at any one of the corresponding positions 5, 7, 8, 14, 17, 18, 21, 38, 42, 45, 46, 47, 50, 51, with reference to SEQ ID NO: 32 or a combination thereof. In some embodiments, a TfR-binding peptide comprises canonical amino acid residues as surface interface residues at any one of the corresponding positions G5, A7, S8, N14, L17, E18, E21, L38, L42, L45, D46, H47, S50, Q51, with reference to SEQ ID NO: 32 or a combination thereof. In some embodiments, the peptide or peptide complex of the present disclosure comprises at least one or more of these corresponding residues in SEQ ID NO: 96, SEQ ID NO: 65-SEQ ID NO: 95, SEQ ID NO: 97-SEQ ID NO: 128, SEQ ID NO: 220-SEQ ID NO: 222, or SEQ ID NO: 1-SEQ ID NO: 64. Such peptides can accordingly be engineered with enhanced binding to TfR. In some embodiments, a TfR-binding peptide disclosed herein comprises X₁X₂X₃X₄GX₅ASX₆X₇X₈X₉X₁₀NX₁₁X₁₂LEX₁₃X₁₄EX₁₅X₁₆X₁₇X₁₈X₁₉X₂₀X₂₁X₂₂X₂₃X₂₄X₂₅X₂₆X₂₇X₂₈X₂₉X₃₀LX₃₁X₃₂X₃₃LX₃₄X₃₅LDHX₃₆X₃₇SQ (SEQ ID NO: 155), wherein X₁, X₂, X₃, X₄, X₅, X₆, X₇, X₈, X₉, X₁₀, X₁₁, X₁₂, X₁₃, X₁₄, X₁₅, X₁₆, X₁₇, X₁₈, X₁₉, X₂₀, X₂₁, X₂₂, X₂₃, X₂₄, X₂₅, X₂₆, X₂₇, X₂₈, X₂₉, X₃₀, X₃₁, X₃₂, X₃₃, X₃₄, X₃₅, X₃₆, and X₃₇ can independently be any amino acid.

[0193] In some embodiments, surface-distal hydrophilic amino acid residues (e.g., D, E, H, K, R, N, Q, S, or T) present in the amino acid sequence of a peptide contribute to peptide solubility. In some embodiments, a peptide as disclosed herein comprises a hydrophilic amino acid residue at any one of the corresponding positions 3, 4, 9, 11, 15, 16, 19, 23, 26, 28, 29, 30, 31, 32, 33, 35, 36, 37, 39, 40, with reference to SEQ ID NO: 32, or any combination thereof. In some instances, a peptide of the present disclosure comprises hydrophilic amino acid residues at the following corresponding positions: R3, E4, R9, K12, D15, E16, K19, R23, S26, S28, N29, T30, E31, E32, D33, E35, Q36, E37, E39, D40, with reference to SEQ ID NO: 32, or any combination thereof. In some embodiments, any one of or any combination of corresponding positions R3, E4, R9, K12, D15, E16, K19, R23, S26, S28, N29, T30, E31, E32, D33, E35, Q36, E37, E39, D40 with reference to SEQ ID NO: 32, can be mutated to another hydrophilic residue without significantly impacting solubility or TfR-binding. In some embodiments, a TfR-binding peptide disclosed herein comprises X₁X₂REX₃X₄X₅X₆RX₇X₈KX₉X₁₀DEX₁₁X₁₂KX₁₃X₁₄X₁₅RX₁₆X₁₇SX₁₈SNTEEDX₁₉EQEX₂₀EDX₂₁X₂₂X₂₃X₂₄X₂₅X₂₆X₂₇X₂₈X₂₉X₃₀X₃₁ (SEQ ID NO: 156), wherein X₁, X₂, X₃, X₄, X₅, X₆, X₇, X₈, X₉, X₁₀, X₁₁, X₁₂, X₁₃, X₁₄, X₁₅, X₁₆, X₁₇, X₁₈, X₁₉, X₂₀, X₂₁, X₂₂, X₂₃, X₂₄, X₂₅, X₂₆, X₂₇, X₂₈, X₂₉, X₃₀, and X₃₁ can independently be any amino acid. In some embodiments, a TfR-binding peptide disclosed herein comprises GSX₁X₂GCASX₃CMX₄YNX₅X₆LEX₇CEAX₈MMX₉MX₁₀X₁₁X₁₂X₁₃X₁₄X₁₅CX₁₆X₁₇X₁₈LX₁₉X₂₀LLYCLDHCHSQ (SEQ ID NO: 157) or X₁X₂GCASX₃CMX₄YNX₅X₆LEX₇CEAX₈MMX₉MX₁₀X₁₁X₁₂X₁₃X₁₄X₁₅CX₁₆X₁₇X₁₈LX₁₉X₂₀L LYCLDHCHSQ (SEQ ID NO: 171), wherein X₁, X₂, X₃, X₄, X₅, X₆, X₇, X₈, X₉, X₁₀, X₁₁, X₁₂, X₁₃, X₁₄, X₁₅, X₁₆, X₁₇, X₁₈, X₁₉, and X₂₀ can be independently selected from D, E, H, K, R, N, Q, S, or T.

[0194] In some embodiments, a peptide of the present disclosure comprises cysteine amino acid residues at corresponding positions 4, 8, 18, 32, 42, and 46 with reference to SEQ ID NO: 96. In some embodiments, a peptide of the present disclosure comprises cysteine amino acid residues at corresponding positions 6, 10, 20, 34, 44, and 48 with reference to SEQ ID NO: 32. In some embodiments, a peptide of the present disclosure comprises hydrophilic residues (e.g., D, E, H, K, R, N, Q, S, or T) at corresponding positions 15, 35, 39, 49, with reference to SEQ ID NO: 32, or any combination thereof. In some instances, a peptide of the present disclosure comprises hydrophilic amino acid residues at the following corresponding positions: D15, E35, E39, H49, with reference to SEQ ID NO: 32, or any combination thereof. In some embodiments, any one of or any combination of corresponding positions D15, E35, E39, H49 with reference to SEQ ID NO: 32, can be mutated to another hydrophilic residue without significantly impacting solubility or TfR-binding. In some embodiments, a TfR-binding peptide disclosed herein comprises. In some embodiments, a TfR-binding peptide disclosed herein comprises X₁X₂X₃X₄X₅X₆X₇X₈X₉X₁₀X₁₁X₁₂X₁₃X₁₄DX₁₅X₁₆X₁₇X₁₈X₁₉X₂₀X₂₁X₂₂X₂₃X₂₄X₂₅X₂₆X₂₇X₂₈X₂₉X₃₀X₃₁X₃₂X₃₃EX₃₄X₃₅X₃₆EX₃₇X₃₈X₃₉X₄₀X₄₁X₄₂X₄₃X₄₄X₄₅HX₄₆X₄₇ (SEQ ID NO: 158), wherein X₁, X₂, X₃, X₄, X₅, X₆, X₇, X₈, X₉, X₁₀, X₁₁, X₁₂, X₁₃, X₁₄, X₁₅, X₁₆, X₁₇, X₁₈, X₁₉, X₂₀, X₂₁, X₂₂, X₂₃, X₂₄, X₂₅, X₂₆, X₂₇, X₂₈, X₂₉, X₃₀, X₃₁, X₃₂, X₃₃, X₃₄, X₃₅, X₃₆, X₃₇, X₃₈, X₃₉, X₄₀, X₄₁, X₄₂, X₄₃, X₄₄, X₄₅, X₄₆, and X₄₇ can independently be any amino acid. In some embodiments, a TfR-binding peptide disclosed herein comprises GSREGCASRCMKYNX₁ELEKCEARMMSMSNTEEDCX₂QELX₃DLLYCLDHCX₄SQ (SEQ ID NO: 159) or REGCASRCMKYNX₁ELEKCEARMMSMSNTEEDCX₂QELX₃DLLYCLDHCX₄SQ (SEQ ID NO: 172), wherein X₁, X₂, X₃, and X₄ can be independently selected from D, E, H, K, R, N, Q, S, or T.

[0195] In some embodiments, a peptide of the present disclosure comprises hydrophobic residues (e.g., A, M, I, L, V, F, W, or Y) at corresponding positions 15, 35, 39, 49, with reference to SEQ ID NO: 32, or any combination thereof. In some embodiments, a TfR-binding peptide disclosed herein comprises GSREGCASRCMKYNX₁ELEKCEARMMSMSNTEEDCX₂QELX₃DLLYCLDHCX₄SQ (SEQ ID NO: 160) or REGCASRCMKYNX₁ELEKCEARMMSMSNTEEDCX₂QELX₃DLLYCLDHCX₄SQ (SEQ ID NO: 173), wherein X₁, X₂, X₃, and X₄ can be independently selected from A, M, I, L, V, F, W, or Y. In some embodiments, hydrophilic amino acid residues at any one of the corresponding positions 15, 35, 39, and 49, with reference to SEQ ID NO: 32, are associated with higher binding affinity for TfR (e.g., target engagement) and higher solubility. In some embodiments, mutation of an amino acid residue at any one of the corresponding positions 15, 35, 39, and 49, with reference to SEQ ID NO: 32, from a hydrophobic to a hydrophilic residue can lead to higher binding affinity for TfR (e.g., target engagement) and higher solubility.

[0196] In some embodiments, a peptide of the present disclosure comprises hydrophobic residues (e.g., A, M, I, L, V, F, W, or Y) at corresponding positions 11, 25, 27, with reference to SEQ ID NO: 32, or any combination thereof. In some embodiments, a peptide of the present disclosure comprises hydrophilic residues (e.g., D, E, H, K, R, N, Q, S, or T) at corresponding positions 11, 25, 27, with reference to SEQ ID NO: 32, or any combination thereof. In some embodiments, hydrophobic amino acid residues at any one of the corresponding positions 11, 25, and 27, with reference to SEQ ID NO: 32, are associated with higher binding affinity for TfR (e.g., target engagement) and higher solubility. In some embodiments, mutation of an amino acid residue at any one of the corresponding positions 11, 25, and 27, with reference to SEQ ID NO: 32, from a hydrophilic residue to a hydrophobic residue can lead to higher binding affinity for TfR (e.g., target engagement) and higher solubility. In some embodiments, a peptide of the present disclosure comprises hydrophobic amino acid residues at the corresponding positions M11, M25, M27, with reference to SEQ ID NO: 32, or any combination thereof. In some instances, a peptide comprises the hydrophobic amino acid residues at the corresponding positions M11, M25, and M27, with reference to SEQ ID NO: 32. In some embodiments, any combination of the corresponding positions M11, M25, and M27, with reference to SEQ ID NO: 32, can be mutated to another hydrophobic residue without significantly impacting solubility or TfR-binding. In some embodiments, a TfR-binding peptide disclosed herein comprises X₁X₂X₃X₄X₅X₆X₇X₈X₉X₁₀MX₁₁X₁₂X₁₃X₁₄X₁₅X₁₆X₁₇X₁₈X₁₉X₂₀X₂₁X₂₂X₂₃MX₂₄MX₂₅X₂₆X₂₇X₂₈X₂₉X₃₀X₃₁X₃₂X₃₃X₃₄X₃₅X₃₆X₃₇X₃₈X₃₉X₄₀X₄₁X₄₂X₄₃X₄₄X₄₅X₄₆X₄₇X₄₈ (SEQ ID NO: 161), wherein X₁, X₂, X₃, X₄, X₅, X₆, X₇, X₈, X₉, X₁₀, X₁₁, X₁₂, X₁₃, X₁₄, X₁₅, X₁₆, X₁₇, X₁₈, X₁₉, X₂₀, X₂₁, X₂₂, X₂₃, X₂₄, X₂₅, X₂₆, X₂₇, X₂₈, X₂₉, X₃₀, X₃₁, X₃₂, X₃₃, X₃₄, X₃₅, X₃₆, X₃₇, X₃₈, X₃₉, X₄₀, X₄₁, X₄₂, X₄₃, X₄₄, X₄₅, X₄₆, X₄₇, and X₄₈ can independently be any amino acid. In some embodiments, a TfR-binding peptide disclosed herein comprises GSREGCASRCX₁KYNDELEKCEARMX₂SX₃SNTEEDCEQELEDLLYCLDHCHSQ (SEQ ID NO: 162) or REGCASRCX₁KYNDELEKCEARMX₂SX₃SNTEEDCEQELEDLLYCLDHCHSQ (SEQ ID NO: 174), wherein X₁, X₂, and X₃ can be independently selected from A, M, I, L, V, F, W, or Y.

[0197] In some embodiments, a TfR-binding peptide disclosed herein comprises GSREGCASRCX₁KYNDELEKCEARMX₂SX₃SNTEEDCEQELEDLLYCLDHCHSQ (SEQ ID NO: 163) or REGCASRCX₁KYNDELEKCEARMX₂SX₃SNTEEDCEQELEDLLYCLDHCHSQ (SEQ ID NO: 175), wherein X₁, X₂, and X₃ can be independently selected from D, E, H, K, R, N, Q, S, or T.

[0198] In some embodiments, a peptide of the present disclosure comprises an aliphatic amino acid residue (e.g., A, M, I, L, or V) at corresponding position 45, with reference to SEQ ID NO: 32. In some embodiments, a peptide of the present disclosure comprises an aromatic amino acid residue (e.g., F, W, or Y) at corresponding position 45. In some embodiments, an aliphatic amino acid residue at corresponding position 45 is associated with higher binding affinity to TfR. In some instances, a peptide comprises the aliphatic amino acid residue corresponding to L45, with reference to SEQ ID NO: 32. In some embodiments, mutation of an amino acid residue at corresponding position 45 from an aromatic residue to an aliphatic reside can lead to higher binding affinity for TfR (e.g., target engagement) and higher solubility. In some embodiments, mutating corresponding position L45 to another aliphatic residue may not significantly impact solubility or TfR-binding. In some embodiments, a TfR-binding peptide disclosed herein comprises X₁X₂X₃X₄X₅X₆X₇X₈X₉X₁₀X₁₁X₁₂X₁₃X₁₄X₁₅X₁₆X₁₇X₁₈X₁₉X₂₀X₂₁X₂₂X₂₃X₂₄X₂₅X₂₆X₂₇X₂₈X₂₉X₃₀X₃₁X₃₂X₃₃X₃₄X₃₅X₃₆X₃₇X₃₈X₃₉X₄₀X₄₁X₄₂X₄₃X₄₄LX₄₅X₄₆X₄₇X₄₈X₄₉X₅₀ (SEQ ID NO: 164), wherein X₁, X₂, X₃, X₄, X₅, X₆, X₇, X₈, X₉, X₁₀, X₁₁, X₁₂, X₁₃, X₁₄, X₁₅, X₁₆, X₁₇, X₁₈, X₁₉, X₂₀, X₂₁, X₂₂, X₂₃, X₂₄, X₂₅, X₂₆, X₂₇, X₂₈, X₂₉, X₃₀, X₃₁, X₃₂, X₃₃, X₃₄, X₃₅, X₃₆, X₃₇, X₃₈, X₃₉, X₄₀, X₄₁, X₄₂, X₄₃, X₄₄, X₄₅, X₄₆, X₄₇, X₄₈, X₄₉, and X₅₀ can independently be any amino acid. In some embodiments, a TfR-binding peptide disclosed herein comprises GSREGCASRCMKYNDELEKCEARMMSMSNTEEDCEQELEDLLYCXIDHCHSQ (SEQ ID NO: 165) or REGCASRCMKYNDELEKCEARMMSMSNTEEDCEQELEDLLYCXIDHCHSQ (SEQ ID NO: 176), wherein X₁ can be independently selected from A, M, I, L, or V.

[0199] In some embodiments, a peptide of the present disclosure comprises GSREGCASRCMX₁YNDELEX₂CEARMMSMSNTEEDCEQELEDLLYCLDHCHSQ (SEQ ID NO: 166) or REGCASRCMX₁YNDELEX₂CEARMMSMSNTEEDCEQELEDLLYCLDHCHSQ (SEQ ID NO: 177), wherein X₁ and X₂ can be independently selected from K or R. In some embodiments, these residues at corresponding position 12 and 19, with reference to SEQ ID NO: 32, can be used for chemical conjugation to another molecule (e.g., an active or a detectable agent). In some embodiments, X₁ and X₂ are both R and chemical conjugation occurs at the N-terminus of the peptide.

[0200] In some embodiments, a receptor-binding peptide may be derived from an antibody or antibody fragment. For example, a receptor-binding peptide may be derived from a single chain antibody fragment (scFv). Examples of TfR-binding peptides that may be incorporated into a selective depletion complex of the present disclosure include SEQ ID NO: 220 (QVQLQESGGGVVQPGRSLRLSCAASRFTFSSYAMHWVRQAPGKGLEWVAVISYDGSN KYYADSVKGRFTISRDNSKNTLYLQMNSLRAEDTAVYYCARDLSGYGDYPDYWGQGT LVTVSSGGGGSGGGGSGGGGSSELTQDPAVSVALGQTVRITCQGDSLRSYYASWYQQK PGQAPVLVMYGRNERPSGVPDRFSGSKSGTSASLAISGLQPEDEANYYCAGWDDSLTG PVFGGGTKLTVLG), SEQ ID NO: 221 (QVQLQESGGGVVQPGRSLRLSCAASRFTFNNYAMHWVRQAPGKGLEWVAVISYDGS NKYYADSVKGRFTISRDNSKNTLYLQMNSLRAEDTAVYYCARDL SGYGDYPDYWGQ GTLVTVSSGGGGSGGGGSGGGGSSELTQDPAVSVALGQTVRITCQGDSLRSYYASWYQ QKPGQAPVLVMYGRNERPSGVPDRFSGSKSGTSASLAISGLQPEDEANYYCAGWDDSL TGPVFGGGTKLTVLG), and SEQ ID NO: 222 (QVQLQESGGGVVQPGRSLRLSCAASRYPFHHHIDHHWVRQAPGKGLEWVAVISYDGS NKYYADSVKGRFTISRDNSKNTLYLQMNSLRAEDTAVYYCARDLSGYGDYPDYWGQ GTLVTVSSGGGGSGGGGSGGGGSSELTQDPAVSVALGQTVRITCQGDSLRSYYASWYQ QKPGQAPVLVMYGRNERPSGVPDRFSGSKSGTSASLAISGLQPEDEANYYCAGWDDSL TGPVFGGGTKLTVLG). In some embodiments, a TfR-binding peptide may have a sequence of any one of SEQ ID NO: 220-SEQ ID NO: 222, or a fragment thereof. In some embodiments, a TfR-binding peptide may have a sequence that has at least 80%, at least 90%, at least 92%, at least 93%, at least 94%, at least 95%, at least 96%, at least 97%, at least 98%, or at least 99% sequence identity with any one of SEQ ID NO: 220-SEQ ID NO: 222, or a fragment thereof. In some embodiments, a peptide of SEQ ID NO: 220 or SEQ ID NO: 221 may function as a pH-independent TfR-binding peptide. In some embodiments, a peptide of SEQ ID NO: 222 may function as a pH-dependent TfR-binding peptide.

[0201] In some embodiments, mutations in any one or more of the amino acid residues of a peptide of the present disclosure can improve binding affinity of the peptide to TfR. In some embodiments, mutations in 5-80% of amino acid residues of a peptide of the present disclosure improve the binding affinity of the peptide to TfR. In some embodiments, mutations in 1-100%, 5-100%, or 5-50% of amino acid residues of a peptide of the present disclosure improve binding affinity of the peptide to TfR. In some embodiments, mutations in 15-50% of amino acid residues of a peptide of the present disclosure improve binding affinity of the peptide to TfR. In some embodiments, mutations in 15-30% of amino acid residues of a peptide of the present disclosure improve binding affinity of the peptide to TfR. In some embodiments, mutations in 25-30% of amino acid residues of a peptide of the present disclosure improve binding affinity of the peptide to TfR. For example, mutations in 14 of the 51 amino acid residues (27.5%) of a peptide having a sequence of SEQ ID NO: 32 can improve binding affinity of the peptide to TfR.

[0202] In some embodiments, mutations in any one or more of the amino acid residues of a peptide of the present disclosure can lie at the binding interface of TfR. In some embodiments, a mutation to a peptide can improve binding affinity, which can be beneficial to binding and transcytosis of a peptide or peptide complex disclosed herein. In some embodiments, the peptides provided herein can have many mutations or few mutations to obtain optimal activity, wherein optimal activity is sufficient binding for engagement of the TfR, but not necessarily binding that is so strong as to preclude release of the peptide and/or peptide complex after transcytosis. Thus, peptides of the present disclosure can comprise a number of mutations (also referred to as % mutated amino acid residues) that tune binding affinity and off rate to obtain optimal binding, function (e.g., transcytosis, BBB-penetration, cell membrane penetration, transport across a biological barrier, endocytosis, recycling, or combinations thereof), and release of the peptide or peptide complex. Thus, mutations that result in the highest possible affinity may not necessarily correlate to a superior peptide having optimal binding and transcytosis.

[0203] In some embodiments, 1-100% or 5-100% of amino acid residues of a peptide of the present disclosure lie at the binding interface of TfR. In some embodiments, 10-90% of amino acid residues of a peptide of the present disclosure lie at the binding interface of TfR. In some embodiments, 20-80% of amino acid residues of a peptide of the present disclosure lie at the binding interface of TfR. In some embodiments, 30-70% of amino acid residues of a peptide of the present disclosure lie at the binding interface of TfR. In some embodiments, 40-60% of amino acid residues of a peptide of the present disclosure lie at the binding interface of TfR. In some embodiments, 30-35% of amino acid residues of a peptide of the present disclosure lie at the binding interface of TfR. For example, 17 of the 51 amino acid residues (33%) of a peptide having a sequence of SEQ ID NO: 32 can lie at the binding interface of TfR.

[0204] In some embodiments, mutations in any one or more of the amino acid residues of a peptide of the present disclosure that lie at the binding interface of TfR can improve binding affinity of the peptide to TfR. In some embodiments, mutations in 1-100% or 5-100% of amino acid residues of a peptide of the present disclosure that lie at the binding interface of TfR improve binding affinity of the peptide to TfR. In some embodiments, mutations in 5-80% of amino acid residues of a peptide of the present disclosure that lie at the binding interface of TfR improve binding affinity of the peptide to TfR. In some embodiments, mutations in 10-70% of amino acid residues of a peptide of the present disclosure that lie at the binding interface of TfR improve binding affinity of the peptide to TfR. In some embodiments, mutations in 15-60% of amino acid residues of a peptide of the present disclosure that lie at the binding interface of TfR improve binding affinity of the peptide to TfR. In some embodiments, mutations in 20-50% of amino acid residues of a peptide of the present disclosure that lie at the binding interface of TfR improve binding affinity of the peptide to TfR. In some embodiments, mutations in 25-30% of amino acid residues of a peptide of the present disclosure that lie at the binding interface of TfR improve binding affinity of the peptide to TfR. For example, mutations in 5 of the 17 amino acid residues (29%) of a peptide having a sequence of SEQ ID NO: 32 that lie at the binding interface of TfR and can improve binding affinity of the peptide to TfR.

[0205] In some embodiments, mutations in any one or more of the amino acid residues of a peptide of the present disclosure are distal to the binding interface of TfR. In some embodiments, 1-100% or 5-100% of amino acid residues of a peptide of the present disclosure are distal to the binding interface of TfR. In some embodiments, 10-90% of amino acid residues of a peptide of the present disclosure are distal to the binding interface of TfR. In some embodiments, 20-80% of amino acid residues of a peptide of the present disclosure are distal to the binding interface of TfR. In some embodiments, 30-70% of amino acid residues of a peptide of the present disclosure are distal to the binding interface of TfR. In some embodiments, 40-60% of amino acid residues of a peptide of the present disclosure are distal to the binding interface of TfR. In some embodiments, 65-70% of amino acid residues of a peptide of the present disclosure are distal to the binding interface of TfR. For example, 34 of the 51 amino acid residues (66%) of a peptide having a sequence of SEQ ID NO: 32 can lie at the binding interface of TfR.

[0206] In some embodiments, mutations in any one or more of the amino acid residues of a peptide of the present disclosure are distal to the binding interface of TfR improve binding affinity of the peptide to TfR. In some embodiments, mutations in 1-100% or 5-100% of amino acid residues of a peptide of the present disclosure that are distal to the binding interface of TfR improve binding affinity of the peptide to TfR. In some embodiments, mutations in 5-80% of amino acid residues of a peptide of the present disclosure that are distal to the binding interface of TfR improve binding affinity of the peptide to TfR. In some embodiments, mutations in 10-70% of amino acid residues of a peptide of the present disclosure that are distal to the binding interface of TfR improve binding affinity of the peptide to TfR. In some embodiments, mutations in 15-60% of amino acid residues of a peptide of the present disclosure that are distal to the binding interface of TfR improve binding affinity of the peptide to TfR. In some embodiments, mutations in 20-50% of amino acid residues of a peptide of the present disclosure that are distal to the binding interface of TfR improve binding affinity of the peptide to TfR. In some embodiments, mutations in 25-30% of amino acid residues of a peptide of the present disclosure that are distal to the binding interface of TfR improve binding affinity of the peptide to TfR. For example, mutations in 5 of the 17 amino acid residues that are distal to the binding interface of TfR can improve binding affinity of the peptide to TfR. For example, mutations in 9 of the 34 amino acid residues (26.5%) of a peptide having a sequence of SEQ ID NO: 32 that are distal to the binding interface of TfR can improve binding affinity of the peptide to TfR. In some embodiments, and without being bound to any theory, one or more mutations in the amino acid residues of the peptide that are distal to the binding interface of TfR can improve protein folding, enhance protein solubility, and/or alter the backbone geometry that can improve binding through an optimized interface shape complementarity.

[0207] In some embodiments, a receptor-binding peptide of the present disclosure may be a PD-L1-binding peptide. The PD-L1-binding peptide may be incorporated into a selective depletion complex of the present disclosure to facilitate selective depletion of a target molecule via PD-L1-mediated endocytosis. In some embodiments, the PD-L1-binding peptide that is a receptor-binding peptide may bind PD-L1 with an affinity that is pH-independent (for example, a similar affinity at extracellular pH and at an endosomal pH) or may bind PD-L1 with an affinity that is pH-dependent (for example, a higher affinity at extracellular pH and a lower affinity at an endosomal pH). Examples of PD-L1-binding peptides are provided in TABLE 2.

TABLE 2
Exemplary PD-L1-Binding Peptides

| SEQ ID NO | Target-Binding Peptide Sequence |
|---|---|
| SEQ ID NO: 187 | EEDCKVHCVKEWMAGKACAERQKSYTIGRAHCSGQKFDVFKCLDHCAAP |
| SEQ ID NO: 233 | EHDCKVHCVKEWMAGHACAERQKSYTIGRAHCSGQKFDVFKCLDHCAAP |
| SEQ ID NO: 234 | EHDCKVHCVKEWMAGKACAERQKSYTIGRAHCSGQKFDVFKCLDHCAAP |
| SEQ ID NO: 235 | EEDCKVHCVKEWHAGKACAERQKSYTIGRAHCSGQKFDVFKCLDHCAAP |
| SEQ ID NO: 236 | EEDCKVHCVKEWMAGHACAERQKSYTIGRAHCSGQKFDVFKCLDHCAAP |
| SEQ ID NO: 237 | EHDCKVHCVKEWHAGKACAERQKSYTIGRAHCSGQKFDVFKCLDHCAAP |
| SEQ ID NO: 238 | EEDCKVHCVKEWHAGHACAERQKSYTIGRAHCSGQKFDVFKCLDHCAAP |
| SEQ ID NO: 239 | EHDCKVHCVKEWHAGHACAERQKSYTIGRAHCSGQKFDVFKCLDHCAAP |
| SEQ ID NO: 400 | EEDCKVHCVKEWMAGKACAERDKSYTIGRAHCSGQKFDVFKCLDHCAAP |
| SEQ ID NO: 401 | EEDCKVHCVKEWMAGKACAERNKSYTIGRAHCSGQKFDVFKCLDHCAAP |
| SEQ ID NO: 402 | EEDCKVHCVKEWAAYKACAERIKSYTIGRAHCSGQYFDVWKCLDHCAAP |
| SEQ ID NO: 403 | ARTCESQSHRFKGPCVSMTNCASVCRTERFSGGHCRGFRRRCLCTKHC |
| SEQ ID NO: 404 | ARTCESQSHRFKGPCVSDTNCASVCYTERFSGGHCRGFRRRCLCTKHC |
| SEQ ID NO: 405 | ARTCESQSHRFKGPCVSDTNCASVCRTERFSGGHCMGFRRRCLCTKHC |
| SEQ ID NO: 406 | EEDCKVHCVKWWMAGKACAERNKSYTIGRAHCSGQKFDVFKCLDHCAAP |
| SEQ ID NO: 407 | EEDCKVHCVKWWAAGKACAERNKSYTIGRAHCSGQKFDVFKCLDHCAAP |
| SEQ ID NO: 408 | EEDCKVHCVKWWMAYKACAERNKSYTIGRAHCSGQKFDVFKCLDHCAAP |
| SEQ ID NO: 409 | EEDCKVHCVKWWMAGKACAERIKSYTIGRAHCSGQKFDVFKCLDHCAAP |
| SEQ ID NO: 410 | EEDCKVHCVKWWMAGKACAERNKSYTIGRAHCSGQYFDVFKCLDHCAAP |
| SEQ ID NO: 411 | EEDCKVHCVKWWMAGKACAERNKSYTIGRAHCSGQKFDVWKCLDHCAAP |
| SEQ ID NO: 412 | EEDCKVHCVKWWAAYKACAERIKSYTIGRAHCSGQYFDVWKCLDHCAAP |
| SEQ ID NO: 413 | EEDCKVHCVKEWMAYKACAERIKSYTIGRAHCSGQYFDVWKCLDHCAAP |
| SEQ ID NO: 414 | EEDCKVHCVKEWAAGKACAERIKSYTIGRAHCSGQYFDVWKCLDHCAAP |
| SEQ ID NO: 415 | EEDCKVHCVKEWAAYKACAERNKSYTIGRAHCSGQYFDVWKCLDHCAAP |
| SEQ ID NO: 416 | EEDCKVHCVKEWAAYKACAERIKSYTIGRAHCSGQKFDVWKCLDHCAAP |
| SEQ ID NO: 417 | EEDCKVHCVKEWAAYKACAERIKSYTIGRAHCSGQYFDVFKCLDHCAAP |
| SEQ ID NO: 418 | EEDCKVHCVKEWMAGKACAERIKSYTIGRAHCSGQYFDVWKCLDHCAAP |
| SEQ ID NO: 419 | EEDCKVHCVKEWMAYKACAERNKSYTIGRAHCSGQYFDVWKCLDHCAAP |
| SEQ ID NO: 420 | EEDCKVHCVKEWMAYKACAERIKSYTIGRAHCSGQKFDVWKCLDHCAAP |
| SEQ ID NO: 421 | EEDCKVHCVKEWMAYKACAERIKSYTIGRAHCSGQYFDVFKCLDHCAAP |
| SEQ ID NO: 422 | EEDCKVHCVKEWAAGKACAERNKSYTIGRAHCSGQYFDVWKCLDHCAAP |
| SEQ ID NO: 423 | EEDCKVHCVKEWAAGKACAERIKSYTIGRAHCSGQKFDVWKCLDHCAAP |
| SEQ ID NO: 424 | EEDCKVHCVKEWAAGKACAERIKSYTIGRAHCSGQYFDVFKCLDHCAAP |
| SEQ ID NO: 425 | EEDCKVHCVKEWAAYKACAERNKSYTIGRAHCSGQKFDVWKCLDHCAAP |
| SEQ ID NO: 426 | EEDCKVHCVKEWAAYKACAERNKSYTIGRAHCSGQYFDVFKCLDHCAAP |
| SEQ ID NO: 427 | EEDCKVHCVKEWAAYKACAERIKSYTIGRAHCSGQKFDVFKCLDHCAAP |
| SEQ ID NO: 428 | EEDCKVHCVKEWMAGKACAERQKSDTTGQAHCSGQKFDVFKCLDHCAAP |
| SEQ ID NO: 429 | EEDCKVHCVKEWMAGKACAERNKSDTTGQAHCSGQKFDVFKCLDHCAAP |
| SEQ ID NO: 430 | EEDCKVHCVKEWAAYKACAERIKSDTTGQAHCSGQYFDVWKCLDHCAAP |
| SEQ ID NO: 431 | EEDCKVHCVKWWMAGKACAERNKSDTTGQAHCSGQKFDVFKCLDHCAAP |
| SEQ ID NO: 432 | EEDCKVHCVKWWAAGKACAERNKSDTTGQAHCSGQKFDVFKCLDHCAAP |
| SEQ ID NO: 433 | EEDCKVHCVKWWMAYKACAERNKSDTTGQAHCSGQKFDVFKCLDHCAAP |
| SEQ ID NO: 434 | EEDCKVHCVKWWMAGKACAERIKSDTTGQAHCSGQKFDVFKCLDHCAAP |
| SEQ ID NO: 435 | EEDCKVHCVKWWMAGKACAERNKSDTTGQAHCSGQYFDVFKCLDHCAAP |
| SEQ ID NO: 436 | EEDCKVHCVKWWMAGKACAERNKSDTTGQAHCSGQKFDVWKCLDHCAAP |
| SEQ ID NO: 437 | EEDCKVHCVKWWAAYKACAERIKSDTTGQAHCSGQYFDVWKCLDHCAAP |
| SEQ ID NO: 438 | EEDCKVHCVKEWMAYKACAERIKSDTTGQAHCSGQYFDVWKCLDHCAAP |
| SEQ ID NO: 439 | EEDCKVHCVKEWAAGKACAERIKSDTTGQAHCSGQYFDVWKCLDHCAAP |
| SEQ ID NO: 440 | EEDCKVHCVKEWAAYKACAERNKSDTTGQAHCSGQYFDVWKCLDHCAAP |
| SEQ ID NO: 441 | EEDCKVHCVKEWAAYKACAERIKSDTTGQAHCSGQKFDVWKCLDHCAAP |
| SEQ ID NO: 442 | EEDCKVHCVKEWAAYKACAERIKSDTTGQAHCSGQYFDVFKCLDHCAAP |
| SEQ ID NO: 443 | EEDCKVHCVKEWMAGKACAERIKSDTTGQAHCSGQYFDVWKCLDHCAAP |
| SEQ ID NO: 444 | EEDCKVHCVKEWMAYKACAERNKSDTTGQAHCSGQYFDVWKCLDHCAAP |
| SEQ ID NO: 445 | EEDCKVHCVKEWMAYKACAERIKSDTTGQAHCSGQKFDVWKCLDHCAAP |
| SEQ ID NO: 446 | EEDCKVHCVKEWMAYKACAERIKSDTTGQAHCSGQYFDVFKCLDHCAAP |
| SEQ ID NO: 447 | EEDCKVHCVKEWAAGKACAERNKSDTTGQAHCSGQYFDVWKCLDHCAAP |
| SEQ ID NO: 448 | EEDCKVHCVKEWAAGKACAERIKSDTTGQAHCSGQKFDVWKCLDHCAAP |
| SEQ ID NO: 449 | EEDCKVHCVKEWAAGKACAERIKSDTTGQAHCSGQYFDVFKCLDHCAAP |
| SEQ ID NO: 450 | EEDCKVHCVKEWAAYKACAERNKSDTTGQAHCSGQKFDVWKCLDHCAAP |
| SEQ ID NO: 451 | EEDCKVHCVKEWAAYKACAERNKSDTTGQAHCSGQYFDVFKCLDHCAAP |
| SEQ ID NO: 452 | EEDCKVHCVKEWAAYKACAERIKSDTTGQAHCSGQKFDVFKCLDHCAAP |
| SEQ ID NO: 453 | EESCKPQCVKAWLEYQACAERVEKDESGEAHCTGQYFDLWGCVDKCVAP |
| SEQ ID NO: 454 | ARTCESQSHRFKGPCVSDTMCASVCRTERFSGGHCRGFRRRCLCSKHC |
| SEQ ID NO: 455 | EERCMPQCVKSLYEYEKCLKRVENDDTGHKHCTGHYFDYWSCIDKCVAS |
| SEQ ID NO: 456 | EEDCRVHCVREWMAGRACAERDRSYTIGRAHCSGQRFDVFRCLDHCAAP |

[0208] In some embodiments, a PD-L1-binding peptide disclosed herein comprises a sequence of X¹X²X³CS⁴X⁵X⁶CX⁷X⁸X⁹X¹⁰X¹¹X¹²X¹³X¹⁴X¹⁵CX¹⁶X¹⁷X¹⁸X¹⁹X²⁰X²¹X²²X²³X²⁴XR²⁵X²⁶X²⁷X²⁸C X²⁹X³⁰X³¹X³²X³³X³⁴X³⁵X³⁶X³⁷CX³⁸X³⁹X⁴⁰CX⁴¹X⁴²X⁴³ (SEQ ID NO: 392), wherein X¹ can independently be selected from E, M, V, or W; X² can independently be selected from G, E, L, or F; X³ can independently be selected from D, E, or 5; X⁴ can independently be selected from K, R, or V; X⁵ can independently be selected from E, Q, 5, M, L, or V; X⁶ can independently be selected from D, E, H, K, R, N, Q, 5, or Y; X⁷ can independently be selected from D, M, or V; X⁸ can independently be selected from A, K, R, Q, 5, or T; X⁹ can independently be selected from A, D, E, H, Q, 5, T, M, I, L, V, or W; X¹⁰ can independently be selected from A, E, R, Q, 5, T, W, or P; X¹¹ can independently be selected from A, E, K, R, N, Q, T, M, I, L, V, or W; X¹² can independently be selected from G, A, E, K, N, T, or Y; X¹³ can independently be selected from G, A, D, E, H, K, R, N, Q, 5, T, M, I, L, V, W, Y, or P; X¹⁴ can independently be selected from D, K, R, N, L, or V; X¹⁵ can independently be selected from G, A, D, T, L, W, or P; X¹⁶ can independently be selected from G, A, E, H, K, N, 5, F, or P; X¹⁷ can independently be selected from G, A, D, E, N, or P; X¹⁸ can independently be selected from G, D, H, K, R, N, Q, S, T, V, or Y; X¹⁹ can independently be selected from G, D, E, H, K, N, Q, S, T, M, I, F, W, Y, or P; X²¹ can independently be selected from G, A, D, E, H, K, R, N, Q, S, Y, or P; X²¹ can independently be selected from G, A, D, H, N, Q, S, V, F, or P; X²² can independently be selected from A, D, H, N, Q, S, T, M, I, V, Y, or P; X²³ can independently be selected from G, A, D, K, R, T, W, or Y; X²⁴ can independently be selected from G, A, E, N, Q, T, I, V, or P; X²⁵ can independently be selected from G, D, N, Q, T, L, V, F, or P; X²⁶ can independently be selected from G, A, E, K, R, N, Q, S, T, I, Y, or P; X²⁷ can independently be selected from A, D, N, or I; X²⁸ can independently be selected from G, D, E, H, N, F, or W; X²⁹ can independently be selected from G, A, E, N, S, Y, or P; X³¹ can independently be selected from G, M, or L; X³¹ can independently be selected from G, A, D, K, N, Q, or W; X³² can independently be selected from D, E, H, K, N, Q, S, T, L, V, F, Y, or P; X³³ can independently be selected from G, E, Q, or F; X³⁴ can independently be selected from D or K; X³⁵ can independently be selected from G, V, or P; X³⁶ can independently be selected from G, H, R, V, F, W, or P; X³⁷ can independently be selected from A, D, or K; X³⁸ can independently be selected from E, H, Q, L, or F; X³⁹ can independently be selected from D, E, R, S, T, M, L, or F; X⁴⁰ can independently be selected from G, A, D, E, H, K, R, M, L, or P; X⁴¹ can independently be selected from G, A, K, S, I, or L; X⁴² can independently be selected from G, A, D, E, R, Q, T, or F; and X⁴³ can independently be selected from A, H, N, Q, S, F, or P.

[0209] In some embodiments, a binding peptide disclosed herein comprises a sequence of EEDCKVX¹CVX¹X¹X¹X¹X²X³KX¹CX¹EX¹X⁴X¹X¹X¹X¹X¹X¹X¹AX¹CX¹GX¹X⁵FX⁶VFX⁶CLX¹X¹CX¹X¹X¹ (SEQ ID NO: 393), wherein X¹ can independently be selected from any non-cysteine amino acid; X² can independently be selected from M, I, L, or V; X³ can independently be selected from Y, A, H, K, R, N, Q, S, or T; X⁴ can independently be selected from D, E, N, Q, or P; X⁵ can independently be selected from K or P; and X⁶ can independently be selected from D or K.

[0210] A PD-L1-binding peptide may comprise a PD-L1-binding motif that forms part or all of a binding interface with PD-L1. One or more residues of a PD-L1-binding motif may interact with one or more residues of PD-L1 at the binding interface between the PD-L1-binding peptide and PD-L1. In some embodiments, multiple PD-L1-binding motifs may be present in a PD-L1-binding peptide. A PD-L1-binding motif may comprise a sequence of CX¹X²X³CX⁴X⁵X⁶X⁷X⁸X⁹X¹⁰X¹¹X¹²C (SEQ ID NO: 394), wherein X¹ can independently be selected from K, R, or V; X² can independently be selected from E, Q, S, M, L, or V; X³ can independently be selected from D, E, H, K, R, N, Q, S, or Y; X⁴ can independently be selected from D, M, or V; X⁵ can independently be selected from A, K, R, Q, S, or T; X⁶ can independently be selected from A, D, E, H, Q, S, T, M, I, L, V, or W; X⁷ can independently be selected from A, E, R, Q, S, T, W, or P; X⁸ can independently be selected from A, E, K, R, N, Q, T, M, I, L, V, or W; X⁹ can independently be selected from G, A, E, K, N, T, or Y; X¹⁰ can independently be selected from G, A, D, E, H, K, R, N, Q, S, T, M, I, L, V, W, Y, or P; X¹¹ can independently be selected from D, K, R, N, L, or V; and X¹² can independently be selected from G, A, D, T, L, W, or P. In some embodiments, a PD-L1-binding motif may comprise a sequence of CKVX¹CVX¹X¹X¹X¹X²X³KX¹C (SEQ ID NO: 396), wherein X¹ can independently be selected from any non-cysteine amino acid; X² can independently be selected from M, I, L, or V; and X³ can independently be selected from Y, A, H, K, R, N, Q, S, or T. In some embodiments, a PD-L1-binding motif may comprise a sequence of CKVHCVKEWMAGKAC (SEQ ID NO: 398). In some embodiments, a PD-L1-binding motif may comprise at least about 70%, at least about 75%, at least about 80%, at least about 85%, at least about 90%, at least about 95%, at least about 97%, or at least about 99% identity to SEQ ID NO: 398.

[0211] A PD-L1-binding motif may comprise a sequence of X¹X²X³X⁴X⁵X⁶CX⁷X⁸X⁹C (SEQ ID NO: 395), wherein X¹ can independently be selected from D, E, H, K, N, Q, S, T, L, V, F, Y, or P; X² can independently be selected from G, E, Q, or F; X³ can independently be selected from D or K; X⁴ can independently be selected from G, V, or P; X⁵ can independently be selected from G, H, R, V, F, W, or P; X⁶ can independently be selected from A, D, or K; X⁷ can independently be selected from E, H, Q, L, or F; X⁸ can independently be selected from D, E, R, S, T, M, L, or F; and X⁹ can independently be selected from G, A, D, E, H, K, R, M, L, or P. In some embodiments, a PD-L1-binding motif may comprise a sequence of XFX²VFX²CLX³X³C (SEQ ID NO: 397), wherein X¹ can independently be selected from K or P; X² can independently be selected from D or K; and X³ can independently be selected from any non-cysteine amino acid. In some embodiments, a PD-L1-binding motif may comprise a sequence of KFDVFKCLDHC (SEQ ID NO: 399). In some embodiments, a PD-L1-binding motif may comprise at least about 70%, at least about 75%, at least about 80%, at least about 85%, at least about 90%, at least about 95%, at least about 97%, or at least about 99% identity to SEQ ID NO: 399.

[0212] A PD-L1-binding peptide (e.g., any one of SEQ ID NO: 187, SEQ ID NO: 233-SEQ ID NO: 239, SEQ ID NO: 400-SEQ ID NO: 456, or SEQ ID NO: 240, or a pH-independent variant thereof) with high affinity PD-L1-binding at endosomal pH may be complexed with a target-binding peptide as described herein to form a selective depletion complex for selective depletion of the target molecule. The selective depletion complex can be used to selectively deliver a target molecule across a cellular layer or membrane. For example, the selective depletion complex can be used to selectively deliver the target molecule to an endocytic compartment via PD-L1-mediated endocytosis. The target molecule can be selectively depleted upon binding to the target-binding peptide of the selective depletion complex and endocytosis via PD-L1-mediated endocytosis as described.

[0213] Selective depletion of a target molecule using PD-L1-mediated endocytosis may be used to selectively deplete the target molecule specifically in tissues that express PD-L1. In some embodiments, a selective depletion complex comprising a receptor-binding peptide that binds PD-L1 may be used to selectively deplete a target molecule in a PD-L1 positive cancer, a lung tissue, a pancreatic islet tissue, a lymphoid tissue, a gastrointestinal tissue, a bone marrow tissue, a reproductive tissue, a muscle tissue, an adipose tissue, or any other PD-L1 positive tissue. For example, a selective depletion complex comprising a PD-L1-binding peptide and an ACE2-binding peptide may be used to selectively deplete ACE2 in lung tissue to prevent a viral infection (e.g., a SARS-CoV-2 infection). In another example, a selective depletion complex comprising a PD-L1-binding peptide and an HLA-binding peptide may be used to selectively deplete HLA in pancreatic islet cells to prevent T-cell attack of insulin-expressing cells in type I diabetes.

[0214] A PD-L1-binding peptide (e.g., any one of SEQ ID NO: 187, SEQ ID NO: 233-SEQ ID NO: 239, SEQ ID NO: 400-SEQ ID NO: 456, or SEQ ID NO: 240) may function as a target-binding peptide or a receptor-binding peptide in a selective depletion complex. In some embodiments, a selective depletion complex to selectively deplete PD-L1 may comprise a receptor-binding peptide that does not bind PD-L1 (e.g., a TfR-binding peptide) and a PD-L1-binding peptide (e.g., a pH dependent PD-L1-binding peptide). In some embodiments, a selective depletion complex to selective deplete a target that is not PD-L1 may comprise a target-binding peptide that binds the target (e.g., an EGFR-binding peptide) and a PD-L1-binding peptide (e.g., a pH-independent PD-L1-binding peptide).

### Target-Binding Peptides

[0215] Peptides, peptide complexes, or selective depletion complexes of the present disclosure can comprise a target-binding peptide. The target-binding peptide can be capable of binding a target molecule (e.g., a target protein). In some embodiments, the target-binding peptide can bind to the target molecule with an affinity that is pH-dependent. For example, the target-binding peptide can bind the target molecule with a higher affinity at an extracellular pH (such as about pH 7.4) than at an endosomal pH (such as about pH 5.5). A target-binding peptide can be conjugated to a receptor-binding peptide of the present disclosure (e.g., a TfR-binding peptide any one of SEQ ID NO: 96, SEQ ID NO: 65-SEQ ID NO: 95, SEQ ID NO: 97-SEQ ID NO: 128, SEQ ID NO: 220-SEQ ID NO: 222, or SEQ ID NO: 1-SEQ ID NO: 64 or a PD-L1-binding peptide of any one of SEQ ID NO: 187, SEQ ID NO: 233-SEQ ID NO: 239, SEQ ID NO: 400-SEQ ID NO: 456, or SEQ ID NO: 241) to form a selective depletion complex. The selective depletion complex can be used to selectively deliver a target molecule across a cellular layer or membrane (e.g., BBB or cell membrane). For example, the selective depletion complex can be used to selectively deliver the target molecule to an endocytic compartment via receptor-mediated endocytosis (e.g., PD-L1-mediated endocytosis or TfR-mediated endocytosis). The target molecule can be selectively depleted upon binding to the target-binding peptide of the selective depletion complex and endocytosis via receptor-mediated endocytosis.

[0216] The target molecule can be a soluble molecule. For example, the target molecule can be a secreted peptide or protein, a cell signaling molecule, an extracellular matrix macromolecule (e.g., collagen, elastin, microfibrillar protein, or proteoglycan), a neurotransmitter, a cytokine, a growth factor, a tumor associated antigen, a tumor specific antigen, or a hormone. The target molecule can be a cell surface molecule. For example, the target molecule can be a transmembrane protein, a receptor, including a growth factor receptor, a checkpoint inhibitor, an immune checkpoint inhibitor, an inhibitory immune receptor, a ligand of an inhibitory immune receptor, a macrophage surface protein (e.g., CD14 or CD16), a lipopolysaccharide, or an antibody. An inhibitory immune receptor may be CD200R, CD300a, CD300f, CEACAM1, FcgRiib, ILT-2, ILT-3, ILT-4, ILT-5, LAIR-1, PECAM-1, PILR-alpha, SIRL-1, and SIRP-alpha, CLEC4A, Ly49Q, MICL. Selective depletion of a cell surface molecule using a selective depletion complex comprising a target-binding peptide that binds to the cell surface molecule can result in a reduction of the cell surface molecule (e.g., a surface exposed protein). The surface exposed protein can be associated with a disease or a condition. In some embodiments, a selective depletion complex of the present disclosure can comprise two or more target-binding peptides to promote dimerization of a target molecule. Promoting dimerization can increase internalization of the target molecule, resulting in selective depletion of the target molecule. For example, a selective depletion complex comprising two copies of a target-binding peptide can promote homodimerization of the target molecule. In some embodiments, a target-binding peptide of the present disclosure may comprise a miniprotein, a nanobody, an antibody, an IgG, an antibody fragment, a Fab, a F(ab)2, an scFv, an (scFv)2, a DARPin, or an affibody. In some embodiments, the target-binding peptide may comprise a cystine-dense peptide, an affitin, an adnectin, an avimer, a Kunitz domain, a nanofittin, a fynomer, a bicyclic peptide, a beta-hairpin, or a stapled peptide.

[0217] In some embodiments, a target-binding peptide of the present disclosure can bind to the target molecule with an affinity that is pH-dependent. For example, the target-binding peptide can bind the target molecule at an extracellular pH (such as about pH 7.4) with an affinity that is higher than the binding affinity at an endocytic pH (such as about pH 7.0, pH 6.5, pH 6.0, or pH 5.5). In some embodiments, the binding affinity of the target-binding peptide for the target molecule at an extracellular pH (about pH 7.4) can be at least about 1.1-fold, at least about 1.2-fold, at least about 1.3-fold, at least about 1.4-fold, at least about 1.5-fold, at least about 1.6-fold, at least about 1.7-fold, at least about 1.8-fold, at least about 1.9-fold, at least about 2-fold, at least about 2.5-fold, at least about 3-fold, at least about 3.5-fold, at least about 4-fold, at least about 4.5-fold, at least about 5-fold, at least about 6-fold, at least about 7-fold, at least about 8-fold, at least about 9-fold, at least about 10-fold, at least about 15-fold, at least about 20-fold, at least about 25-fold, at least about 30-fold, at least about 35-fold, at least about 40-fold, at least about 45-fold, at least about 50-fold, at least about 60-fold, at least about 70-fold, at least about 80-fold, at least about 90-fold, at least about 100-fold, at least about 200-fold, at least about 500-fold, at least about 1000-fold, at least about 10,000-fold the binding affinity of the target-binding peptide for the target molecule at an endosomal pH (such as about pH 7.0, pH 6.5, pH 6.0, pH 5.5, or pH 5.0). In some embodiments, the affinity of the target-binding peptide for the target at pH 6.5 or pH 5.5 is no greater than about 0.1%, about 0.5%, about 1%, about 5%, about 10%, about 20%, about 30%, about 40%, or about 50% the affinity of the target binding peptide for the target at pH 7.4. In some embodiments, the affinity of the target-binding peptide for the target at pH 7.4 is at least 2-fold, at least 3-fold, at least 4-fold, at least 5-fold, at least 6-fold, at least 7-fold, at least 8-fold, at least 9-fold, at least 10-fold, at least 15-fold, or at least 20-fold greater than the affinity of the target-binding peptide for the target at pH 6.5 or pH 5.5

[0218] In some embodiments, a target-binding peptide with pH-dependent binding can bind a target molecule with a dissociation constant (K_{D}) of less than 50 μM, less than 5 μM, less than 500 nM, less than 100 nM, less than 40 nM, less than 30 nM, less than 20 nM, less than 10 nM, less than 5 nM, less than 2 nM, less than 1 nM, less than 0.5 nM, less than 0.4 nM, less than 0.3 nM, less than 0.2 nM, or less than 0.1 nM at extracellular pH (such as about pH 7.4). In some embodiments, a target-binding peptide with pH-dependent binding can bind a target molecule with a dissociation constant (K_{D}) of at least 1 nM, at least 2 nM, at least 5 nM, at least 10 nM, at least 20 nM, at least 50 nM, at least 100 nM, at least 200 nM, at least 500 nM, at least 1 μM, at least 2 μM, at least 5 μM, at least 10 μM, at least 20 μM, at least 50 μM, at least 100 μM, at least 500 μM, at least 1 mM, at least 2 mM, at least 5 mM, at least 10 mM, at least 20 mM, at least 50 mM, at least 100 mM, at least 200 mM, at least 500 mM, or at least 1 M at endosomal pH (about pH 5.5 or about pH 6.5).

[0219] In some embodiments, the target-binding molecule can release the target molecule upon internalization into an endosomal compartment and acidification of the endosome. Such release the target molecule upon acidification of the endosome can occur at about pH 7.3, pH 7.2, pH 7.1, pH 7.0, pH 6.9, pH 6.8, pH 6.7, pH 6.6, pH 6.5, pH 6.4, pH 6.3, pH 6.2, pH 6.1, pH 6.0, pH 5.9, pH 5.8, pH 5.7, pH 5.6, pH 5.5, pH 5.4, pH 5.3, pH 5.2, pH 5.1, pH 5.0, pH 4.9, pH 4.8, pH 4.7, pH 4.6, pH 4.5, or lower. In some embodiments, release of the target molecule can occur at a pH of from about pH 7.0 to about pH 4.5, from about pH 6.5 to about pH 5.0, or from about pH 6.0 to about pH 5.5 or lower.

[0220] Target-binding peptides with pH-dependent binding affinity can be engineered by selective integration of histidine (His) amino acid residues in the target binding interface. In some instances, a target-binding peptide with pH-dependent binding affinity comprises at least 1, at least 2, at least 3, at least 4, at least 5, at least 6, at least 7, at least 8, at least 9, at least 10, at least 11, at least 12, at least 13, at least 14, at least 15, at least 16, at least 17, at least 18, at least 19, or at least 20 histidine residues in the target binding interface. Since the side chain of histidine is predominantly uncharged at pH between about 6.0 and about 9.2 and predominantly positively charged at pH below about 6.0, selectively inserting or removing His residues in a target-binding peptide can impart pH-dependent binding properties. A target-binding peptide (e.g., a target-binding peptide with pH-dependent binding affinity) can comprise a cystine-dense peptide (CDP), an affibody, a DARPin, a centyrin, a nanofittin, or an adnectin. A target-binding CDP, a target-binding affibody, a target-binding adnectin can be stable at low pH (e.g., at endosomal pH). In some embodiments, a target-binding peptide can comprise an antibody (e.g., IgG or other antibody), an antibody fragment, (e.g., scFv, scFv2, Fab, F(ab)2, or other antibody fragment), or a nanobody (e.g., a VHH-domain nanobody or VNAR-domain nanobody from camelids or sharks), which can be stable at a low pH.

[0221] In some embodiments, release of the target molecule by the target-binding peptide upon internalization into an endosomal compartment can be affected by differences in the ionic strength between the extracellular physiologic environment and endosomal cellular compartments. In some embodiments, the ionic strength of the endosomal compartment is higher than the ionic strength of the extracellular physiologic environment. Ionic strength, which varies with salt concentration, may depend on the concentrations of various electrolytes in solution, for example hydrogen (H⁺), hydroxide (OH®), hydronium (H₃O⁺), sodium (Na⁺), potassium (K⁺), calcium (Ca²⁺), magnesium (Mg²⁺), manganese (Mn²⁺), chloride (Cl⁻), carbonate (CO₃²⁻), cobalt (Co²⁺), phosphate (PO₄³⁻), or nitrate (NO₃⁻). In some embodiments, target-binding peptides with salt-dependent or ionic strength-dependent binding affinity can be engineered by selective integration of salt labile moieties (e.g., polar or charged amino acid side chains) in the target binding interface that would enable dissociation of the target-binding molecule in the endosome. For example, the target binding interface of the target-binding peptide may form one or more polar or charge-charge interactions with the target-binding peptide that can be disrupted as the ionic strength of the environment increases.

[0222] In some instances, a target-binding peptide with a binding affinity dependent on ionic strength (e.g., dependent on hydrogen, hydroxide, hydronium, sodium, potassium, calcium, magnesium, manganese, chloride, carbonate, cobalt, phosphate, and/or nitrate concentration) could dissociate over a range of ionic strengths, for example ionic strengths from about 30 mM to about 1 M. In some embodiments, an ionic strength-dependent target-binding peptide with a binding affinity dependent on ionic strength could dissociate at an ionic strength of from about 50 mM to about from about 50 mM to about 1 M, from about 60 mM to about 950 mM, from about 70 mM to about 900 mM, from about 80 mM to about 850 mM, from about 90 mM to about 800 mM, from about 100 mM to about 750 mM, from about 110 mM to about 700 mM, from about 120 mM to about 650 mM, from about 130 mM to about 600 mM, from about 140 mM to about 550 mM, from about 150 mM to about 500 mM, from about 160 mM to about 450 mM, from about 170 mM to about 400 mM, from about 180 mM to about 350 mM, from about 190 mM to about 300 mM, or from about 200 mM to about 250 mM. In some embodiments, the ionic strength-dependent target-binding peptide comprises at least 1, at least 2, at least 3, at least 4, at least 5, at least 6, at least 7, at least 8, at least 9, at least 10, at least 11, at least 12, at least 13, at least 14, at least 15, at least 16, at least 17, at least 18, at least 19, or at least 20 polar or charge-charge interactions in the target binding interface.

[0223] A target-binding peptide of the present disclosure may bind to a target molecule, such as a target molecule with clinical relevance. In some embodiments, a target molecule may be a soluble molecule, extracellular molecule, or cell-surface molecule. In some embodiments, the target molecule is a protein, peptide, lipid, carbohydrate, a nucleic acid, or glycan. In some embodiments, a target molecule may be a protein that is over-expressed or over-activated in a disease or condition. For example, a target molecule may be a transmembrane protein involved in oncogenic signaling, immune suppression, or pro-inflammatory signaling. Examples of target molecules that may be targeted by a target-binding peptide of the present disclosure include but are not limited to CD3, CD47, CD28, CD137, CD89, CD16, CD29, CD44, CD71, CD73, CD90, CD105, CD166, CD27, CD39, CD24, CD25, CD74, CD40L, MUC1, MUC16, MUC2, MUC5AC, MUC4, OX40, 4-1BB, HLA-G, LAG3, Tim3, TIGIT, GITR, TCR, TNF-α, EGFR, EGFRvIII, TKI-resistant EGFR, HER2, ERBB3, PDGFR, FGF, VEGF, VEGFR, IGFR1, CTLA4, STRO1, complement factor C4, complement factor C1q, complement factor C1s, complement factor C1r, complement factor C3, complement factor C3a, complement factor C3b, complement factor C5, complement factor C5a, TGFβ, PCSK9, P2Y6, HER3, RANK, tau, amyloid ß, huntingtin, α-synuclein, glucocerebrosidase, α-glucosidase, IL-1, IL-1R, IL-1β, IL-2, IL-2R, IL-4, IL-5, IL-6, IL-6R, IL-10, IL-10R, IL-17, IL-23, IL-12, p40, a member of the B7 family, c-Met, SIGLEC, MCP-1, an MHC, an MHC I, an MHC II, PD-1, and PD-L1. Additional examples of target molecules include mannose-6-phosphate glycans, glucose-6-phosphate, and sugar-specific receptors (e.g., lectins). Additional examples of target molecules include autoantibodies, such as rheumatoid factor, antinuclear antibody, antineutrophil cytoplasmic antiboides, anti-dsDNA, anticentromere antibodies, anithistone antibodies, cyclic citriullinated peptide antibodies, extractable nuclear antigen antibodies, cardiolipin antibodies, beta-2 glycoprotein 1 antibodies, antiphospholipid antibodies, lupus anticoagulants, diabetes-related autoantibodies, anti-tissue translugtaminase, anti-gliadin antibodies, intrinsic factor antibodies, parietal cell antibodies, thyroid autoantibodies, smooth muscle antibodies, antimitochronrial antibodies, liver kidney microsome type 1 antibodies, anti-glomerular basement membrane, acetylcholine receptor antibodies. The target molecule (e.g., CD3, CD47, CD28, CD137, CD89, CD16, CD29, CD44, CD71, CD73, CD90, CD105, CD166, CD27, CD39, CD24, CD25, CD74, CD40L, MUC1, MUC16, MUC2, MUC5AC, MUC4, OX40, 4-1BB, HLA-G, LAG3, Tim3, TIGIT, GITR, TCR, TNF-α, EGFR, EGFRvIII, TKI-resistant EGFR, HER2, ERBB3, PDGFR, FGF, VEGF, VEGFR, IGFR1, CTLA4, STRO1, complement factor C4, complement factor C1q, complement factor C1s, complement factor C1r, complement factor C3, complement factor C3a, complement factor C3b, complement factor C5, complement factor C5a, TGFβ, PCSK9, P2Y6, HER3, RANK, tau, amyloid ß, huntingtin, α-synuclein, glucocerebrosidase, α-glucosidase, IL-1, IL-1R, IL-1α, IL-1β, IL-2, IL-2R, IL-4, IL-5, IL-6, IL-6R, IL-10, IL-10R, IL-17, IL-23, IL-12, p40, a member of the B7 family, c-Met, SIGLEC, MCP-1, an MHC, an MHC I, an MHC II, PD-1, or PD-L1) may be endocytosed and degraded upon binding to the target-binding peptide of a selective depletion complex.

[0224] In some embodiments, a target molecule may be a transmembrane protein, such as a receptor tyrosine kinase. Examples of receptor tyrosine kinases that may be targeted using a selective depletion complex include EGF receptor, ErbB, Insulin receptor, PDGF receptor, VEGF receptor, FGF receptor, CCK receptor, NGF receptor, HGF receptor, Eph receptor, AXL receptor, TIE receptor, RYK receptor, DDR receptor, RET receptor, ROS receptor, LTK receptor, ROR receptor, MuSK receptor, and LMR receptor. Targeting the transmembrane protein using a selective depletion complex may lead to internalization and degradation of the transmembrane protein. In some embodiments, a target molecule may be a pathogen (e.g., a virus or a bacteria) or a pathogen surface molecule (e.g., a protein or a glycoprotein). For example, the target molecule may be a coronavirus spike protein, an influenza virus hemagglutinin, or a herpes simplex virus glycoprotein M. Targeting the pathogen or the pathogen surface protein using a selective depletion complex may lead to internalization and degradation of the pathogen, thereby treating or preventing an infection caused by the pathogen.

[0225] Endocytosis and subsequent degradation of the target molecule may treat (e.g., eliminate, reduce, slow progression of, or treat symptoms of) a disease or condition associated with the target molecule. In some embodiments, targeting and degradation of a receptor tyrosine kinase with a selective depletion complex may be beneficial in treating a variant of cancers. For example, targeting and degrading EGFR with a selective depletion complex comprising an EGFR-binding peptide may be beneficial in treating cancers, such as non-small-cell lung cancer, primary non-small-cell lung cancer, metastatic non-small-cell lung cancer, head and neck cancer, head and neck squamous cell carcinoma, glioblastoma, brain cancer, metastatic brain cancer, colorectal cancer, colon cancer, tyrosine kinase inhibitor (TKI)-resistant cancer, cetuximab-resistant cancer, necitumumab-resistant cancer, panitumumab-resistant cancer, local cancer, regionally advanced cancer, recurrent cancer, metastatic cancer, refractory cancer, KRAS wildtype cancer, KRAS mutant cancers, or exon20 mutant non-small-cell lung cancer. In another example, targeting and degrading TNF-α with a selective depletion complex comprising a TNF-α-binding peptide may be beneficial in treating inflammatory or neurological conditions, including those in the CNS, such as neuroinflammation, neuroinflammatory disease, stroke, traumatic brain injury, Alzheimer's disease, or other tauopathies including neurofibrillary tangle dementia, chronic traumatic encephalopathy (CTE), aging-related tau astrogliopathy, frontotemporal dementia, parkinsonism, progressive supranuclear palsy, corticobasal degeneration, lytico-bodig disease, ganglioglioma, meningioangiomatosis, or subacute sclerosing panencephalitis. For example, targeting and degrading TNF-α with a selective depletion complex comprising a TNF-α-binding peptide may also be beneficial in treating inflammatory conditions that may not be localized to the CNS (e.g., ankylosing spondylitis, antiphospholipid antibody syndrome, gout, inflammatory arthritis center, myositis, rheumatoid arthritis, scleroderma, Sjogren's disease, systemic lupus erythematosus (lupus), vasculitis, psoriasis, inflammatory bowel disease, Crohn's disease, or ulcerative colitis). A selective depletion complex of the present disclosure can be used to target pathogenic immune complexes, such as those in circulation. Circulating antigen-antibody complexes can be involved in autoimmune and inflammatory diseases as well as in malignancy. This can include glomerulonephritis, systemic lupus erythematosus (lupus), rheumatoid arthritis, and cutaneous vasculitis.

[0226] A selective depletion complex of the present disclosure can be used to target a complement pathway in a complement-mediated disease, such as facioscapulohumeral muscular dystrophy (FSHD) or schizophrenia. Such selective depletion complexes may be well-suited for treatment of FSDH since TfR is highly expressed on muscle cells, so efficient degradation of complement pathway component(s) would be expected. In some embodiments, targeting and degrading complement factor C4, or factors upstream (e.g., complement factor C1q, complement factor C1s, or complement factor C1r) or downstream (e.g., complement factor C3, complement factor C3a, complement factor C3b, complement factor C5, or complement factor C5a) of C4 in the complement pathway, in the CNS may treat schizophrenia. C4 is subsequently used as an exemplar of this pathway with the understanding that other complement components regulating the activation of C4 or executing the continuation of this pathway have equal standing for regulating the biological consequences of the increased activity of this pathway. As schizophrenia affects nearly 1% of humans with onset most often during adolescence, a composition comprising a selective depletion complex to treat schizophrenia would be beneficial. The complement pathway may serve as a common pathway in schizophrenia, and therapies comprising the selective depletion complexes of the present disclosure promoting degradation of C4 or a downstream complement pathway would be beneficial to patients. In some embodiments, a selective depletion complex of the present disclosure may be used to target complement-mediated diseases in the central nervous system. For example, a selective depletion complex comprising a peptide that binds one or more C4A forms could be used to target C4A long (e.g., including HERV incorporation) or short forms for degradation as described herein. Additional target molecules that may be targeted and depleted using a selective depletion complex for treatment of schizophrenia include molecules encoded by the extended MHC complex on chromosome 6, molecules encoded by the complement C4 locus (e.g., encoded by the C4Along locus or the c4Ashort locus), molecules encoded by sequences containing a single nucleotide polymorphisms in CUB and Sushi multiple domains 1 (CSMD1) gene on chromosome 8, complement factor C4, complement factor C3, or C3 receptor. Targeted degradation of complement factor C4, complement factor C3, or molecules that prevent degradation of complement factor C4 or complement factor C3 may be beneficial in treating schizophrenia. For example, a selective depletion complex of the present disclosure may treat schizophrenia by reducing excessive synaptic pruning, preventing reduction in gray matter, and preventing psychotic symptoms in patients that are predisposed to schizophrenia by polymorphisms in C4, CSMD1 or other genes. A selective depletion complex for treatment of schizophrenia (e.g., comprising a complement factor C4-binding peptide) may provide a narrow and precise form of immunosuppression which may prevent toxicities that occur when broad immunosuppression is used for long periods of time, as is common for chronic illnesses such as schizophrenia. In some embodiments, a selective depletion complex for treatment of schizophrenia may be administered in combination with an additional drug (e.g., minocycline, doxycycline, steroids, an inhibitor of C4 degradation, or an anti-psychotic agent). Additionally, the selective depletion complexes of the present disclosure may be well-suited for treatment of CNS-associated disorders such a schizophrenia due to the ability of the selective depletion complexes to penetrate the blood-brain barrier (BBB) and access the CNS via TfR-binding. A selective depletion complex (e.g., comprising a TfR-binding peptide) may facilitate higher BBB

[0227] In some embodiments, binding and subsequently depleting a target molecule using a selective depletion complex of the present disclosure comprising a target-binding peptide may be used to treat a disease or condition wherein the target molecule is a cell-based or soluble moiety associated with a disease or condition and is expressed or present in diseased tissues or cells. In some embodiments, depletion of the target molecule may be cell type or tissue dependent. For example, depletion of a target molecule may be specific to cells or tissues expressing both the target molecule targeted by the target-binding peptide of the selective depletion complex and the cell surface receptor targeted by the receptor-binding peptide of the selective depletion complex. The degradation and depletion and of the target molecule using a selective depletion complex may prevent, treat, or ameliorate the disease or condition.

[0228] In some embodiments, a target-binding peptide may comprise a sequence of any one of SEQ ID NO: 187, SEQ ID NO: 219, SEQ ID NO: 233-SEQ ID NO: 244, or SEQ ID NO: 400-SEQ ID NO: 456. In some embodiments, a target-binding peptide may comprise a sequence having at least 80%, at least 90%, at least 92%, at least 93%, at least 94%, at least 95%, at least 96, at least 97% at least 98, or at least 99% sequence identity with any one of SEQ ID NO: 233, SEQ ID NO: 187, or SEQ ID NO: 234-SEQ ID NO: 244, or a fragment thereof. For example, a target binding peptide may comprise a sequence having at least 800%, at least 900%, at least 920%, at least 9300 at least 9400 at least 9500 at least 960%, at least 9700 at least 980%, or at least 991 sequence identity with SEQ ID NO: 233, or the target binding peptide may comprise a sequence of SEQ ID NO: 233. Examples of target-binding peptides and their corresponding target molecules are provided in TABLE 3.

TABLE 3
Exemplary Target-Binding Peptides

| Target | SEQ ID NO | Target-Binding Peptide Sequence |
|---|---|---|
| PD-L1 | SEQ ID NO: 187 | EEDCKVHCVKEWMAGKACAERQKSYTIGRAHCSGQKFDVFK |
| | | CLDHCAAP |
| PD-L1 | SEQ ID NO: 233 | EHDCKVHCVKEWMAGHACAERQKSYTIGRAHCSGQKFDVFK |
| | | CLDHCAAP |
| PD-L1 | SEQ ID NO: 234 | EHDCKVHCVKEWMAGKACAERQKSYTIGRAHCSGQKFDVFK |
| | | CLDHCAAP |
| PD-L1 | SEQ ID NO: 235 | EEDCKVHCVKEWHAGKACAERQKSYTIGRAHCSGQKFDVFKC |
| | | LDHCAAP |
| PD-L1 | SEQ ID NO: 236 | EEDCKVHCVKEWMAGHACAERQKSYTIGRAHCSGQKFDVFK |
| | | CLDHCAAP |
| PD-L1 | SEQ ID NO: 237 | EHDCKVHCVKEWHAGKACAERQKSYTIGRAHCSGQKFDVFKC |
| | | LDHCAAP |
| PD-L1 | SEQ ID NO: 238 | EEDCKVHCVKEWHAGHACAERQKSYTIGRAHCSGQKFDVFKC |
| | | LDHCAAP |
| PD-L1 | SEQ ID NO: 239 | EHDCKVHCVKEWHAGHACAERQKSYTIGRAHCSGQKFDVFKC |
| | | LDHCAAP |
| PD-L1 | SEQ ID NO: 241 | DIVLTQSPATLSLSPGERATLSCRATESVEYYGTSLVQWYQQKP |
| | | GQPPKLLIYAASSVDSGVPSRFSGSGSGTDFTLTINSLEAEDAAT |
| | | YFCQQSRRVPYTFGQGTKLEIKGGGGSGGGGSGGGGSEVQLVQ |
| | | SGAEVKKPGASVKMSCKASGYTFTSYVMHWVKQAPGQRLEW |
| | | IGYVNPFNDGTKYNEMFKGRATLTSDKSTSTAYMELSSLRSED |
| | | TAVYYCARQAWGYPWGQGTLVTVSS |
| PD-L1 | SEQ ID NO: 400 | EEDCKVHCVKEWMAGKACAERDKSYTIGRAHCSGQKFDVFK |
| | | CLDHCAAP |
| PD-L1 | SEQ ID NO: 401 | EEDCKVHCVKEWMAGKACAERNKSYTIGRAHCSGQKFDVFK |
| | | CLDHCAAP |
| PD-L1 | SEQ ID NO: 402 | EEDCKVHCVKEWAAYKACAERIKSYTIGRAHCSGQYFDVWKC |
| | | LDHCAAP |
| PD-L1 | SEQ ID NO: 403 | ARTCESQSHRFKGPCVSMTNCASVCRTERFSGGHCRGFRRRCL |
| | | CTKHC |
| PD-L1 | SEQ ID NO: 404 | ARTCESQSHRFKGPCVSDTNCASVCYTERFSGGHCRGFRRRCL |
| | | CTKHC |
| PD-L1 | SEQ ID NO: 405 | ARTCESQSHRFKGPCVSDTNCASVCRTERFSGGHCMGFRRRCL |
| | | CTKHC |
| PD-L1 | SEQ ID NO: 406 | EEDCKVHCVKWWMAGKACAERNKSYTIGRAHCSGQKFDVFK |
| | | CLDHCAAP |
| PD-L1 | SEQ ID NO: 407 | EEDCKVHCVKWWAAGKACAERNKSYTIGRAHCSGQKFDVFK |
| | | CLDHCAAP |
| PD-L1 | SEQ ID NO: 408 | EEDCKVHCVKWWMAYKACAERNKSYTIGRAHCSGQKFDVFK |
| | | CLDHCAAP |
| PD-L1 | SEQ ID NO: 409 | EEDCKVHCVKWWMAGKACAERIKSYTIGRAHCSGQKFDVFKC |
| | | LDHCAAP |
| PD-L1 | SEQ ID NO: 410 | EEDCKVHCVKWWMAGKACAERNKSYTIGRAHCSGQYFDVFK |
| | | CLDHCAAP |
| PD-L1 | SEQ ID NO: 411 | EEDCKVHCVKWWMAGKACAERNKSYTIGRAHCSGQKFDVW |
| | | KCLDHCAAP |
| PD-L1 | SEQ ID NO: 412 | EEDCKVHCVKWWAAYKACAERIKSYTIGRAHCSGQYFDVWK |
| | | CLDHCAAP |
| PD-L1 | SEQ ID NO: 413 | EEDCKVHCVKEWMAYKACAERIKSYTIGRAHCSGQYFDVWK |
| | | CLDHCAAP |
| PD-L1 | SEQ ID NO: 414 | EEDCKVHCVKEWAAGKACAERIKSYTIGRAHCSGQYFDVWKC |
| | | LDHCAAP |
| PD-L1 | SEQ ID NO: 415 | EEDCKVHCVKEWAAYKACAERNKSYTIGRAHCSGQYFDVWK |
| | | CLDHCAAP |
| PD-L1 | SEQ ID NO: 416 | EEDCKVHCVKEWAAYKACAERIKSYTIGRAHCSGQKFDVWKC |
| | | LDHCAAP |
| PD-L1 | SEQ ID NO: 417 | EEDCKVHCVKEWAAYKACAERIKSYTIGRAHCSGQYFDVFKC |
| | | LDHCAAP |
| PD-L1 | SEQ ID NO: 418 | EEDCKVHCVKEWMAGKACAERIKSYTIGRAHCSGQYFDVWK |
| | | CLDHCAAP |
| PD-L1 | SEQ ID NO: 419 | EEDCKVHCVKEWMAYKACAERNKSYTIGRAHCSGQYFDVWK |
| | | CLDHCAAP |
| PD-L1 | SEQ ID NO: 420 | EEDCKVHCVKEWMAYKACAERIKSYTIGRAHCSGQKFDVWK |
| | | CLDHCAAP |
| PD-L1 | SEQ ID NO: 421 | EEDCKVHCVKEWMAYKACAERIKSYTIGRAHCSGQYFDVFKC |
| | | LDHCAAP |
| PD-L1 | SEQ ID NO: 422 | EEDCKVHCVKEWAAGKACAERNKSYTIGRAHCSGQYFDVWK |
| | | CLDHCAAP |
| PD-L1 | SEQ ID NO: 423 | EEDCKVHCVKEWAAGKACAERIKSYTIGRAHCSGQKFDVWKC |
| | | LDHCAAP |
| PD-L1 | SEQ ID NO: 424 | EEDCKVHCVKEWAAGKACAERIKSYTIGRAHCSGQYFDVFKC |
| | | LDHCAAP |
| PD-L1 | SEQ ID NO: 425 | EEDCKVHCVKEWAAYKACAERNKSYTIGRAHCSGQKEDVWK |
| | | CLDHCAAP |
| PD-L1 | SEQ ID NO: 426 | EEDCKVHCVKEWAAYKACAERNKSYTIGRAHCSGQYFDVFKC |
| | | LDHCAAP |
| PD-L1 | SEQ ID NO: 427 | EEDCKVHCVKEWAAYKACAERIKSYTIGRAHCSGQKFDVFKC |
| | | LDHCAAP |
| PD-L1 | SEQ ID NO: 428 | EEDCKVHCVKEWMAGKACAERQKSDTTGQAHCSGQKFDVFK |
| | | CLDHCAAP |
| PD-L1 | SEQ ID NO: 429 | EEDCKVHCVKEWMAGKACAERNKSDTTGQAHCSGQKFDVFK |
| | | CLDHCAAP |
| PD-L1 | SEQ ID NO: 430 | EEDCKVHCVKEWAAYKACAERIKSDTTGQAHCSGQYFDVWK |
| | | CLDHCAAP |
| PD-L1 | SEQ ID NO: 431 | EEDCKVHCVKWWMAGKACAERNKSDTTGQAHCSGQKFDVF |
| | | KCLDHCAAP |
| PD-L1 | SEQ ID NO: 432 | EEDCKVHCVKWWAAGKACAERNKSDTTGQAHCSGQKFDVFK |
| | | CLDHCAAP |
| PD-L1 | SEQ ID NO: 433 | EEDCKVHCVKWWMAYKACAERNKSDTTGQAHCSGQKFDVF |
| | | KCLDHCAAP |
| PD-L1 | SEQ ID NO: 434 | EEDCKVHCVKWWMAGKACAERIKSDTTGQAHCSGQKFDVFK |
| | | CLDHCAAP |
| PD-L1 | SEQ ID NO: 435 | EEDCKVHCVKWWMAGKACAERNKSDTTGQAHCSGQYFDVF |
| | | KCLDHCAAP |
| PD-L1 | SEQ ID NO: 436 | EEDCKVHCVKWWMAGKACAERNKSDTTGQAHCSGQKFDVW |
| | | KCLDHCAAP |
| PD-L1 | SEQ ID NO: 437 | EEDCKVHCVKWWAAYKACAERIKSDTTGQAHCSGQYFDVWK |
| | | CLDHCAAP |
| PD-L1 | SEQ ID NO: 438 | EEDCKVHCVKEWMAYKACAERIKSDTTGQAHCSGQYFDVWK |
| | | CLDHCAAP |
| PD-L1 | SEQ ID NO: 439 | EEDCKVHCVKEWAAGKACAERIKSDTTGQAHCSGQYFDVWK |
| | | CLDHCAAP |
| PD-L1 | SEQ ID NO: 440 | EEDCKVHCVKEWAAYKACAERNKSDTTGQAHCSGQYFDVWK |
| | | CLDHCAAP |
| PD-L1 | SEQ ID NO: 441 | EEDCKVHCVKEWAAYKACAERIKSDTTGQAHCSGQKFDVWK |
| | | CLDHCAAP |
| PD-L1 | SEQ ID NO: 442 | EEDCKVHCVKEWAAYKACAERIKSDTTGQAHCSGQYFDVFKC |
| | | LDHCAAP |
| PD-L1 | SEQ ID NO: 443 | EEDCKVHCVKEWMAGKACAERIKSDTTGQAHCSGQYFDVWK |
| | | CLDHCAAP |
| PD-L1 | SEQ ID NO: 444 | EEDCKVHCVKEWMAYKACAERNKSDTTGQAHCSGQYFDVW |
| | | KCLDHCAAP |
| PD-L1 | SEQ ID NO: 445 | EEDCKVHCVKEWMAYKACAERIKSDTTGQAHCSGQKFDVWK |
| | | CLDHCAAP |
| PD-L1 | SEQ ID NO: 446 | EEDCKVHCVKEWMAYKACAERIKSDTTGQAHCSGQYFDVFKC |
| | | LDHCAAP |
| PD-L1 | SEQ ID NO: 447 | EEDCKVHCVKEWAAGKACAERNKSDTTGQAHCSGQYFDVWK |
| | | CLDHCAAP |
| PD-L1 | SEQ ID NO: 448 | EEDCKVHCVKEWAAGKACAERIKSDTTGQAHCSGQKFDVWK |
| | | CLDHCAAP |
| PD-L1 | SEQ ID NO: 449 | EEDCKVHCVKEWAAGKACAERIKSDTTGQAHCSGQYFDVFKC |
| | | LDHCAAP |
| PD-L1 | SEQ ID NO: 450 | EEDCKVHCVKEWAAYKACAERNKSDTTGQAHCSGQKFDVWK |
| | | CLDHCAAP |
| PD-L1 | SEQ ID NO: 451 | EEDCKVHCVKEWAAYKACAERNKSDTTGQAHCSGQYFDVFK |
| | | CLDHCAAP |
| PD-L1 | SEQ ID NO: 452 | EEDCKVHCVKEWAAYKACAERIKSDTTGQAHCSGQKFDVFKC |
| | | LDHCAAP |
| PD-L1 | SEQ ID NO: 453 | EESCKPQCVKAWLEYQACAERVEKDESGEAHCTGQYFDLWGC |
| | | VDKCVAP |
| PD-L1 | SEQ ID NO: 454 | ARTCESQSHRFKGPCVSDTMCASVCRTERFSGGHCRGFRRRCL |
| | | CSKHC |
| PD-L1 | SEQ ID NO: 455 | EERCMPQCVKSLYEYEKCLKRVENDDTGHKHCTGHYFDYWSC |
| | | IDKCVAS |
| PD-L1 | SEQ ID NO: 456 | EEDCRVHCVREWMAGRACAERDRSYTIGRAHCSGQRFDVFRC |
| | | LDHCAAP |
| EGFR | SEQ ID NO: 219 | QVKLEESGGGSVQTGGSLRLTCAASGRTSRSYGMGWFRQAPG |
| | | KEREFVSGISWRGDSTGYADSVKGRFTISRDNAKNTVDLQMNS |
| | | LKPEDTAIYYCAAAAGSAWYGTLYEYDYWGQGTQVTVSS |
| EGFR | SEQ ID NO: 242 | QVKLEESGGGSVQTGGSLRLTCAASGHTSRSYGMGWFRQAPG |
| | | KEREFVSGISWRGDSTGYADSVKGRFTISRDNAKNTVDLQMNS |
| | | LKPEDTAIYYCAAAAGSAWYHTLYEYDYWGQGTQVTVSS |
| EGFR | SEQ ID NO: 243 | QVKLEESGGGSVQTGGSLRLTCAASGHTSRSYGMHWFRQAPG |
| | | KEREFVSGISWRGDSTGYADSVKGRFTISRDNAKNTVDLQMNS |
| | | LKPEDTAIYYCAAAAGSHWYGTHYEYDYWGQGTQVTVSS |
| EGFR | SEQ ID NO: 244 | NSDSECPLSHDGYCLHGGVCMYIKAVDRYACNCVVGYIGERC |
| | | QYRDLTWWGPR |

### Cystine-Dense Peptides

[0229] In some embodiments, TfR-binding peptides or target-binding peptides of the present disclosure comprise one or more Cys, or one or more disulfide bonds. In some embodiments, the TfR-binding peptides or the target-binding peptides are derived from cystine-dense peptides (CDPs), knotted peptides, or hitchins. As used herein, the term “peptide” is considered to be interchangeable with the terms “knotted peptide”, “cystine-dense peptide”, “CDP”, and “hitchin”. (See e.g., Correnti et al. Screening, large-scale production, and structure-based classification for cystine-dense peptides. Nat Struct Mol Biol. 2018 March; 25(3): 270-278).

[0230] The TfR-binding peptides of the present disclosure, or derivatives, fragments, or variants thereof, can be have an affinity and selectively for TfR, or a derivative or analog thereof. The target-binding peptides of the present disclosure, or derivatives, fragments, or variants thereof, can be have an affinity and selectively for a target molecule. In some cases, the TfR-binding peptides of the present disclosure can be engineered using site-saturation mutagenesis (SSM) to exhibit improved TfR-binding properties or promote transcytosis or endocytosis more effectively. In some cases, the target-binding peptides of the present disclosure can be engineered using site-saturation mutagenesis (SSM) to exhibit improved target-binding properties. In some cases, the peptides of the present disclosure are cystine-dense peptides (CDPs), related to knotted peptides or hitchin-derived peptides or knottin-derived peptides. The TfR-binding peptides can be cystine-dense peptides (CDPs). Hitchins can be a subclass of CDPs wherein six cysteine residues form disulfide bonds according to the connectivity [1-4], 2-5, 3-6 indicating that the first cysteine residue forms a disulfide bond with the fourth residue, the second with the fifth, and the third cysteine residue with the sixth. The brackets in this nomenclature indicate cysteine residues form the knotting disulfide bond. (See e.g., Correnti et al. Screening, large-scale production, and structure-based classification for cystine-dense peptides. Nat Struct Mol Biol. 2018 March; 25(3): 270-278). Knottins can be a subclass of CDPs wherein six cysteine residues form disulfide bonds according to the connectivity 1-4, 2-5, [3-6]. Knottins are a class of peptides, usually ranging from about 20 to about 80 amino acids in length that are often folded into a compact structure. Knottins are typically assembled into a complex tertiary structure that is characterized by a number of intramolecular disulfide crosslinks and can contain beta strands and other secondary structures. The presence of the disulfide bonds gives knottins and hitchins remarkable environmental stability, allowing them to withstand extremes of temperature and pH and to resist the proteolytic enzymes of the blood stream. In some cases, the peptides described herein can be derived from knotted peptides. The amino acid sequences of peptides as disclosed herein can comprise a plurality of cysteine residues. In some cases, at least cysteine residues of the plurality of cysteine residues present within the amino acid sequence of a peptide participate in the formation of disulfide bonds. In some cases, all cysteine residues of the plurality of cysteine residues present within the amino acid sequence of a peptide participate in the formation of disulfide bonds. As described herein, the term “knotted peptide” can be used interchangeably with the terms “cystine-dense peptide”, “CDP”, or “peptide”.

[0231] Provide herein are methods of identification, maturation, characterization, and utilization of CDPs that bind the transferrin receptor and allow selection, optimization and characterization of CDP-TfR binding peptides that can be used in selective depletion complexes, including for use as bioactive molecules at therapeutically relevant concentrations in a subject (e.g., a human or non-human animal). This disclosure demonstrates the utility of CDPs as a diverse scaffold family that can be screened for applicability to modern drug discovery strategies. CDPs comprise alternatives to existing biologics, primarily antibodies, which can bypass some of the liabilities of the immunoglobulin scaffold, including poor tissue permeability, immunogenicity, and long serum half-life that can become problematic if toxicities arise. Peptides of the present disclosure in the 20-80 amino acid range represent medically relevant therapeutics that are mid-sized, with many of the favorable binding specificity and affinity characteristics of antibodies but with improved stability, reduced immunogenicity, and simpler manufacturing methods. The intramolecular disulfide architecture of CDPs provides particularly high stability metrics, reducing fragmentation and immunogenicity, while their smaller size could improve tissue penetration or cell penetration and facilitate tunable serum half-life. Disclosed herein are peptides representing candidate peptides that can serve as vehicles for delivering target molecules to endocytic compartments.

[0232] In some embodiments, TfR-binding peptides can be engineered peptides. An engineered peptide can be a peptide that is non-naturally occurring, artificial, isolated, synthetic, designed, or recombinantly expressed. In some embodiments, the TfR-binding peptides of the present disclosure comprise one or more properties of CDPs, knotted peptides, or hitchins, such as stability, resistance to proteolysis, resistance to reducing conditions, and/or ability to cross the blood brain barrier. In some embodiments, the target-binding peptides of the present disclosure comprise one or more properties of CDPs, knotted peptides, or hitchins, such as stability, resistance to proteolysis, or resistance to reducing conditions.

[0233] CDPs can be advantageous for delivery to the CNS, as compared to other molecules such as antibodies due to smaller size, greater tissue or cell penetration, lack of Fc function, and quicker clearance from serum, and as compared to smaller peptides due to resistance to proteases (both for stability and for immunogenicity reduction). In some embodiments, the TfR-binding peptides or target-binding peptides of the present disclosure (e.g., CDPs, knotted peptides, or hitchins), selective depletion complexes (e.g., comprising one or more TfR-binding peptides and one or more target-binding peptides), or engineered TfR-binding fusion peptides (e.g., comprising one or more TfR-binding peptides and one or more peptides) can have properties that are superior to TfR-binding antibodies or target-binding antibodies. For example, the peptides and complexes described herein can provide superior, deeper, and/or faster tissue or cell penetration to cells and targeted tissues (e.g., brain parenchyma penetration, solid tumor penetration) and faster clearance from non-targeted tissues and serum. The TfR-binding peptides, target-binding peptides, selective depletion complexes, or TfR-binding fusion peptides of this disclosure can have lower molecular weights than TfR-binding antibodies or target-binding antibodies. The lower molecular weight can confer advantageous properties on the TfR-binding peptides, target-binding peptides, selective depletion complexes, or TfR-binding fusion peptides of this disclosure as compared to TfR-binding antibodies or target-binding antibodies. For example, the TfR-binding peptides, selective depletion complexes, or TfR-binding fusion peptides of this disclosure can penetrate a cell or tissue more readily than an anti-TfR antibody or can have lower molar dose toxicity than an anti-TfR antibody. The TfR-binding peptides, target-binding peptides, selective depletion complexes, or TfR-binding fusion peptides of this disclosure can be advantageous for lacking the Fc function of an antibody. The TfR-binding peptides, target-binding peptides, selective depletion complexes, or TfR-binding fusion peptides of this disclosure can be advantageous for allowing higher concentrations, on a molar basis, of formulations.

[0234] In some embodiments, CDPs or knotted peptides, including engineered, non-naturally occurring CDPs and those found in nature (e.g., a target-binding peptide), can be conjugated to, linked to, or fused to the TfR-binding peptides of the present disclosure, such as those described in TABLE 1, to selectively deliver a target molecule to an endocytic compartment of cell. The cell can be a cancer cell, pancreatic cell, liver cell, colon cell, ovarian cell, breast cell, lung cell, spleen cell, bone marrow cell, or any combination thereof. The cell can be any cell that expresses TfR. An engineered peptide can be a peptide that is non-naturally occurring, artificial, synthetic, designed, or recombinantly expressed. In some embodiments, a TfR-binding peptide of the present disclosure, or a complex comprising a TfR-binding peptide (e.g., a selective depletion complex), enables TfR-mediated transcytosis and/or cellular endocytosis, and the additional CDP or knotted peptide that is conjugated to, linked to, or fused to TfR-binding peptide can selectively target a molecule (e.g., an enzyme or other protein of interest) in a cell associated with a disease or condition. In some cases, the cell is a cancer cell. Cancers can include breast cancer, liver cancer, colon cancer, brain cancer, leukemia, lymphoma, non-Hodgkin lymphoma, myeloma, blood-cell-derived cancer, spleen cancer, cancers of the salivary gland, kidney cancer, muscle cancers, ovarian cancer, prostate cancer, pancreatic cancer, gastric cancer, sarcoma, glioblastoma, astrocytoma, glioma, medulloblastoma, ependymoma, choroid plexus carcinoma, midline glioma, diffuse intrinsic pontine glioma, lung cancer, bone marrow cell cancers, or skin cancer, genitourinary cancer, osteosarcoma, muscle-derived sarcoma, melanoma, head and neck cancer, a neuroblastoma, glioblastoma, astrocytoma, glioma, medulloblastoma, ependymoma, choroid plexus carcinoma, midline glioma, and diffuse intrinsic pontine glioma (DIPG), or a CMYC-overexpressing cancer. In some cases, other CDP or knotted peptides (e.g., those found in nature) are conjugated to, linked to, or fused to TfR-binding peptides and are capable of localizing TfR-binding peptides across the blood brain barrier to deliver TfR-binding peptides to target cells in the central nervous system.

[0235] CDPs (e.g., knotted peptides or hitchins) are a class of peptides, usually ranging from about 11 to about 81 amino acids in length that are often folded into a compact structure. Knotted peptides are typically assembled into a complex tertiary structure that is characterized by a number of intramolecular disulfide crosslinks and can contain beta strands, alpha helices, and other secondary structures. The presence of the disulfide bonds gives knotted peptides remarkable environmental stability, allowing them to withstand extremes of temperature and pH and to resist the proteolytic enzymes of the blood stream. The presence of a disulfide knot can provide resistance to reduction by reducing agents. The rigidity of knotted peptides also allows them to bind to targets without paying the “entropic penalty” that a floppy peptide accrues upon binding a target. For example, binding is adversely affected by the loss of entropy that occurs when a peptide binds a target to form a complex. Therefore, “entropic penalty” is the adverse effect on binding, and the greater the entropic loss that occurs upon this binding, the greater the “entropic penalty.” Furthermore, unbound molecules that are flexible lose more entropy when forming a complex than molecules that are rigidly structured, because of the loss of flexibility when bound up in a complex. However, rigidity in the unbound molecule also generally increases specificity by limiting the number of complexes that molecule can form. The peptides can bind targets with antibody-like affinity, or with nanomolar or picomolar affinity. A wider examination of the sequence structure and sequence identity or homology of knotted peptides reveals that they have arisen by convergent evolution in all kinds of animals and plants. In animals, they are often found in venoms, for example, the venoms of spiders and scorpions and have been implicated in the modulation of ion channels. The knotted proteins of plants can inhibit the proteolytic enzymes of animals or have antimicrobial activity, suggesting that knotted peptides can function in molecular defense systems found in plants.

[0236] A peptide of the present disclosure (e.g., a target-binding peptide, a TfR-binding peptide, or a selective depletion complex) can comprise a cysteine amino acid residue. In some embodiments, the peptide has at least 1, at least 2, at least 3, at least 4, at least 5, at least 6, at least 7, at least 8, at least 9, or at least 10 cysteine amino acid residues. In some embodiments, the peptide has at least 6 cysteine amino acid residues. In some embodiments, the peptide has at least 8 cysteine amino acid residues. In other embodiments, the peptide has at least 10 cysteine amino acid residues, at least 12 cysteine amino acid residues, at least 14 cysteine amino acid residues or at least 16 cysteine amino acid residues.

[0237] A knotted peptide can comprise disulfide bridges. A knotted peptide can be a peptide wherein 5% or more of the residues are cysteines forming intramolecular disulfide bonds. A disulfide-linked peptide can be a drug scaffold. In some embodiments, the disulfide bridges form a knot. A disulfide bridge can be formed between cysteine residues, for example, between cysteines 1 and 4, 2 and 5, or, 3 and 6. In some embodiments, one disulfide bridge passes through a loop formed by the other two disulfide bridges, for example, to form the knot. In other embodiments, the disulfide bridges can be formed between any two cysteine residues.

[0238] The present disclosure further includes peptide scaffolds that, e.g., can be used as a starting point for generating additional peptides. In some embodiments, these scaffolds can be derived from a variety of knotted peptides (such as CDPs or knotted peptides or hitchins). In certain embodiments, CDPs (e.g., knotted peptides or hitchins) are assembled into a complex tertiary structure that is characterized by a number of intramolecular disulfide crosslinks, and optionally contain beta strands and other secondary structures such as an alpha helix. For example, CDPs (e.g., knotted peptides) include, in some embodiments, small disulfide-rich proteins characterized by a disulfide through disulfide knot. This knot can be, e.g., obtained when one disulfide bridge crosses the macrocycle formed by two other disulfides and the interconnecting backbone. In some embodiments, the knotted peptides can include growth factor cysteine knots or inhibitor cysteine knots. Other possible peptide structures include peptide having two parallel helices linked by two disulfide bridges without β-sheets (e.g., hefutoxin).

[0239] Some peptides of the present disclosure can comprise at least one amino acid residue in an L configuration. A peptide can comprise at least one amino acid residue in D configuration. In some embodiments, a peptide is 15-75 amino acid residues long. In other embodiments, a peptide is 11-55 amino acid residues long. In still other embodiments, a peptide is 11-65 amino acid residues long. In further embodiments, a peptide is at least 20 amino acid residues long.

[0240] Some CDPs (e.g., knotted peptides) can be derived or isolated from a class of proteins known to be present or associated with toxins or venoms. In some cases, the peptide can be derived from toxins or venoms associated with scorpions or spiders. The peptide can be derived from venoms and toxins of spiders and scorpions of various genus and species. For example, the peptide can be derived from a venom or toxin of the Leiurus quinquestriatus hebraeus, Buthus occitanus tunetanus, Hottentotta judaicus, Mesobuthus eupeus, Buthus occitanus israelis, Hadrurus gertschi, Androctonus australis, Centruroides noxius, Heterometrus laoticus, Opistophthalmus carinatus, Haplopelma schmidti, Isometrus maculatus, Haplopelma huwenum, Haplopelma hainanum, Haplopelma schmidti, Agelenopsis aperta, Haydronyche versuta, Selenocosmia huwena, Heteropoda venatoria, Grammostola rosea, Ornithoctonus huwena, Hadronyche versuta, Atrax robustus, Angelenopsis aperta, Psalmopoeus cambridgei, Hadronyche infensa, Paracoelotes luctosus, and Chilobrachys jingzhaoor another suitable genus or species of scorpion or spider. In some cases, a peptide can be derived from a Buthus martensii Karsh (scorpion) toxin.

[0241] In some embodiments, a peptide of the present disclosure (e.g., a TfR-binding peptide, a target-binding peptide, or a selective depletion complex) can comprise a sequence having cysteine residues at one or more of corresponding positions 11, 12, 13, 14, 19, 20, 21, 22, 36, 38, 39, 41, for example with reference to SEQ ID NO: 96. In some embodiments, a peptide comprises Cys at corresponding positions 11, 12, 19, 20, 36, 39, or any combination thereof. For example, in certain embodiments, a peptide can comprise a sequence having a cysteine residue at corresponding position 11. In certain embodiments, a peptide can comprise a sequence having a cysteine residue at corresponding position 12. In certain embodiments, a peptide can comprise a sequence having a cysteine residue at corresponding position 13. In certain embodiments, a peptide can comprise a sequence having a cysteine residue at corresponding position 14. In certain embodiments, a peptide can comprise a sequence having a cysteine residue at corresponding position 19. In certain embodiments, a peptide can comprise a sequence having a cysteine residue at corresponding position 20. In certain embodiments, a peptide can comprise a sequence having a cysteine residue at corresponding position 21. In certain embodiments, a peptide can comprise a sequence having a cysteine residue at corresponding position 22. In certain embodiments, a peptide can comprise a sequence having a cysteine residue at corresponding position 36. In certain embodiments, a peptide can comprise a sequence having a cysteine residue at corresponding position 38. In certain embodiments, a peptide can comprise a sequence having a cysteine residue at corresponding position 39. In certain embodiments, a peptide can comprise a sequence having a cysteine residue at corresponding position 41. In some embodiments, the first cysteine residue in the sequence can be disulfide bonded with the 4th cysteine residue in the sequence, the 2nd cysteine residue in the sequence can be disulfide bonded to the 5th cysteine residue in the sequence, and the 3rd cysteine residue in the sequence can be disulfide bonded to the 6th cysteine residue in the sequence. Optionally, a peptide can comprise one disulfide bridge that passes through a ring formed by two other disulfide bridges, also known as a “two-and-through” structure system. In some embodiments, the peptides disclosed herein can have one or more cysteines mutated to serine.

[0242] In some embodiments, peptides of the present disclosure (e.g., TfR-binding peptides, target-binding peptides, or selective depletion complexes) comprise at least one cysteine residue. In some embodiments, peptides of the present disclosure comprise at least two cysteine residues. In some embodiments, peptides of the present disclosure comprise at least three cysteine residues. In some embodiments, peptides of the present disclosure comprise at least four cysteine residues. In some embodiments, peptides of the present disclosure comprise at least five cysteine residues. In some embodiments, peptides of the present disclosure comprise at least six cysteine residues. In some embodiments, peptides of the present disclosure comprise at least ten cysteine residues. In some embodiments, a peptide of the present disclosure comprises six cysteine residues. In some embodiments, a peptide of the present disclosure comprises seven cysteine residues. In some embodiments, a peptide of the present disclosure comprises eight cysteine residues.

[0243] In some embodiments, a peptide of the present disclosure (e.g., a TfR-binding peptide, a target-binding peptide, or a selective depletion complex) comprises an amino acid sequence having cysteine residues at one or more positions, for example with reference to SEQ ID NO: 96. In some embodiments, the one or more cysteine residues are located at any one of the corresponding amino acid positions 6, 10, 20, 34, 44, 48, or any combination thereof. In some aspects of the present disclosure, the one or more cysteine (C) residues participate in disulfide bonds with various pairing patterns (e.g., C₁₀-C₂₀). In some embodiments, the corresponding pairing patterns are C₆-C₄₈, C₁₀-C₄₄, and C₂₀-C₃₄. In some embodiments, the peptides as described herein comprise at least one, at least two, or at least three disulfide bonds. In some embodiments, at least one, at least two, or at least three disulfide bonds are arranged according to the corresponding C₆-C₄₈, C₁₀-C₄₄, and C₂₀-C₃₄ pairing patterns, or a combination thereof. In some embodiments, peptides as described herein comprise three disulfide bonds with the corresponding pairing patterns C₆-C₄₈, C₁₀-C₄₄, and C₂₀-C₃₄.

[0244] In certain embodiments, a peptide (e.g., a TfR-binding peptide, a target-binding peptide, or a selective depletion complex) comprises a sequence having a cysteine residue at corresponding position 6. In certain embodiments, a peptide comprises a sequence having a cysteine residue at corresponding position 10. In certain embodiments, a peptide comprises a sequence having a cysteine residue at corresponding position 20. In certain embodiments, a peptide comprises a sequence having a cysteine residue at corresponding position 34. In certain embodiments, a peptide comprises a sequence having a cysteine residue at corresponding position 44. In certain embodiments, a peptide comprises a sequence having a cysteine residue at corresponding position 50. In some embodiments, the first cysteine residue in the sequence is disulfide bonded with the last cysteine residue in the sequence. In some embodiments, the second cysteine residue in the sequence is disulfide bonded with the second to the last cysteine residue in the sequence. In some embodiments, the third cysteine residue in the sequence is disulfide bonded with the third to the last cysteine residue in the sequence and so forth.

[0245] In some embodiments, the first cysteine residue in the sequence is disulfide bonded with the 6th cysteine residue in the sequence, the 2nd cysteine residue in the sequence is disulfide bonded to the 5th cysteine residue in the sequence, and the 3rd cysteine residue in the sequence is disulfide bonded to the 4th cysteine residue in the sequence. Optionally, a peptide can comprise one disulfide bridge that passes through a ring formed by two other disulfide bridges, also known as a “two-and-through” structure system. In some embodiments, the peptides disclosed herein have one or more cysteines mutated to serine.

[0246] In some embodiments, a peptide (e.g., a TfR-binding peptide, a target-binding peptide, or a selective depletion complex) comprises no cysteine or disulfides. In some embodiments, a peptide comprises 1 or more, 2 or more, 3 or more, 4 or more, 5 or more, 6 or more, 7 or more, 8 or more, 9 or more, 10 or more, 11 or more, 12 or more, 13 or more, 14 or more, or 15 or more cysteine or disulfides. In other embodiments, 1 or more, 2 or more, 3 or more, 4 or more, 5 or more, 6 or more, 7 or more, 8 or more, 9 or more, 10 or more cysteine residues have been replaced with serine residues. In some embodiments, 1 or more, 2 or more, 3 or more, 4 or more, 5 or more, 6 or more, 7 or more, 8 or more, 9 or more, 10 or more cysteine residues have been replaced with threonine residues.

[0247] In some embodiments, a peptide (e.g., a TfR-binding peptide, a target-binding peptide, or a selective depletion complex) comprises no Cys or disulfides. In some embodiments, a peptide comprises 1 or more, 2 or more, 3 or more, 4 or more, 5 or more, 6 or more, 7 or more, 8 or more, 9 or more, 10 or more, 11 or more, 12 or more, 13 or more, 14 or more, or 15 or more Cys or disulfides. In other embodiments, 1 or more, 2 or more, 3 or more, 4 or more, 5 or more, 6 or more, 7 or more, 8 or more, 9 or more, 10 or more Cys residues have been replaced with Ser residues. In some embodiments, 1 or more, 2 or more, 3 or more, 4 or more, 5 or more, 6 or more, 7 or more, 8 or more, 9 or more, 10 or more Cys residues have been replaced with Thr residues.

[0248] In some instances, one or more or all of the methionine residues in the peptide are replaced by leucine or isoleucine. In some instances, one or more or all of the tryptophan residues in the peptide are replaced by phenylalanine or tyrosine. In some instances, one or more or all of the asparagine residues in the peptide are replaced by glutamine. In some embodiments, the N-terminus of the peptide is blocked, such as by an acetyl group. Alternatively or in combination, in some instances, the C-terminus of the peptide is blocked, such as by an amide group. In some embodiments, the peptide is modified by methylation on free amines.

[0249] For example, full methylation can be accomplished through the use of reductive methylation with formaldehyde and sodium cyanoborohydride.

[0250] In some embodiments, the peptides or peptide complexes as described herein target and/or penetrate a TfR-expressing cellular layer or barrier and/or the membrane of a TfR-expressing cell. In some embodiments, a peptide targets and/or penetrates a cell membrane of a cell, wherein said cell is located in the CNS such as the brain. For example, a peptide complex comprising a TfR-binding peptide and one or more active agents (e.g., a therapeutic or diagnostic compound) crosses a cellular barrier (e.g., BBB) via vesicular transcytosis, and subsequently targets and/or penetrates the cell membrane of a cell located within the CNS to deliver said one or more active agents to that cell.

[0251] In various embodiments, a selective depletion complex comprising a TfR-binding peptide and a target-binding peptide binds a TfR-expressing cell located in the gastrointestinal tract, spleen, liver, kidney, muscle, bone marrow, brain, or skin. In some cases, the TfR-expressing cell is a tumor cell, an immune cell, an erythrocyte, an erythrocyte precursor cell, a stem cell, a bone marrow cell, or stem cell. In some cases, the TfR-binding peptide is responsible for targeting the cell, e.g., in cases where the cell is overexpressing a TfR. In various embodiments, a peptide complex as described herein comprising a TfR-binding peptide conjugated to, linked to, or fused to a target-binding peptide binds a cell located within various organs such as the spleen, brain, liver, kidney, muscle, bone marrow, gastrointestinal tract, or skin.

[0252] In some cases, the target-biding peptides promotes endocytosis of a target molecule. In some aspects, a peptide or peptide complex (e.g., peptide conjugate or fusion peptide) of the present disclosure is used to target a target molecule in order to exert a certain biological (e.g., therapeutic) effect. In some aspects, a selective depletion complex (e.g., a complex comprising a TfR-binding peptide and a target-binding peptide) of the present disclosure is used to promote endocytosis of a target molecule into said cell to exert a certain biological effect (e.g., selective depletion of the target molecule).

### Peptide Linkers

[0253] The peptides of the presented disclosure (e.g., TfR-binding peptides, target-binding peptides, selective depletion complexes, or combinations thereof) can be dimerized in numerous ways. For example, a TfR-binding peptide can be dimerized with a target-binding peptide via a peptide linker to form a selective depletion complex. In some embodiments, a peptide linker does not disturb the independent folding of peptide domains (e.g., a TfR-binding peptide or a target-binding peptide). In some embodiments, a peptide linker can comprise sufficient length to the peptide complex so as to facilitate contact between a target molecule and a TfR via the peptide complex (e.g., a selective depletion complex). In some embodiments, a peptide linker does not negatively impact manufacturability (synthetic or recombinant) of the peptide complex (e.g., the selective depletion complex). In some embodiments, a peptide linker does not impair post-synthesis chemical alteration (e.g. conjugation of a fluorophore or albumin-binding chemical group) of the peptide complex (e.g., the selective depletion complex).

[0254] In some embodiments, a peptide linker can connect the C-terminus of a first peptide (e.g., a target-binding peptide, a TfR-binding peptide, or a half-life modifying peptide) to the N-terminus of a second peptide (e.g., a target-binding peptide, a TfR-binding peptide, or a half-life modifying peptide). In some embodiments, a peptide linker can connect the C-terminus of the second peptide (e.g., a target-binding peptide, a TfR-binding peptide, or a half-life modifying peptide) to the N-terminus of a third peptide (e.g., a target-binding peptide, a TfR-binding peptide, or a half-life modifying peptide). For example, a linker (e.g., any one of SEQ ID NO: 129-SEQ ID NO: 141 or SEQ ID NO: 195-SEQ ID NO: 218) can connect the C-terminus of a target-binding peptide to the N-terminus of a TfR-binding peptide (e.g., any one of SEQ ID NO: 96, SEQ ID NO: 65-SEQ ID NO: 95, SEQ ID NO: 97-SEQ ID NO: 128, SEQ ID NO: 220-SEQ ID NO: 222, or SEQ ID NO: 1-SEQ ID NO: 64) to form a selective depletion complex. In another example, a linker (e.g., any one of SEQ ID NO: 129-SEQ ID NO: 141 or SEQ ID NO: 195-SEQ ID NO: 218) can connect the C-terminus of a TfR-binding peptide (e.g., any one of SEQ ID NO: 96, SEQ ID NO: 65-SEQ ID NO: 95, SEQ ID NO: 97-SEQ ID NO: 128, SEQ ID NO: 220-SEQ ID NO: 222, or SEQ ID NO: 1-SEQ ID NO: 64) to the N-terminus of a target-binding peptide to form a selective depletion complex. In another example, a linker (e.g., any one of SEQ ID NO: 129-SEQ ID NO: 141 or SEQ ID NO: 195-SEQ ID NO: 218) can connect the C-terminus of a TfR-binding peptide (e.g., any one of SEQ ID NO: 96, SEQ ID NO: 65-SEQ ID NO: 95, SEQ ID NO: 97-SEQ ID NO: 128, SEQ ID NO: 220-SEQ ID NO: 222, or SEQ ID NO: 1-SEQ ID NO: 64) to the N-terminus of a half-life extending peptide (e.g., SEQ ID NO: 178, SEQ ID NO: 179, or SEQ ID NO: 192) and the C-terminus of the half-life extending peptide to the N-terminus of a target binding peptide to form a selective depletion complex. In another example, a linker (e.g., any one of SEQ ID NO: 129-SEQ ID NO: 141 or SEQ ID NO: 195-SEQ ID NO: 218) can connect the C-terminus of a target-binding peptide to the N-terminus of a half-life extending peptide (e.g., SEQ ID NO: 178, SEQ ID NO: 179, or SEQ ID NO: 192) and a second linker (e.g., any one of SEQ ID NO: 129-SEQ ID NO: 141 or SEQ ID NO: 195-SEQ ID NO: 218) can connect the C-terminus of the half-life extending peptide to the N-terminus of a TfR-binding peptide (e.g., any one of SEQ ID NO: 96, SEQ ID NO: 65-SEQ ID NO: 95, SEQ ID NO: 97-SEQ ID NO: 128, SEQ ID NO: 220-SEQ ID NO: 222, or SEQ ID NO: 1-SEQ ID NO: 64) to form a selective depletion complex. In another example, a first linker (e.g., any one of SEQ ID NO: 129-SEQ ID NO: 141 or SEQ ID NO: 195-SEQ ID NO: 218) can connect the C-terminus of a target-binding peptide to the N-terminus of a half-life extending peptide (e.g., SEQ ID NO: 178, SEQ ID NO: 179, or SEQ ID NO: 192) and a second linker (e.g., any one of SEQ ID NO: 129-SEQ ID NO: 141 or SEQ ID NO: 195-SEQ ID NO: 218) can connect the C-terminus of the half-life extending peptide to the N-terminus of a TfR-binding peptide (e.g., any one of SEQ ID NO: 96, SEQ ID NO: 65-SEQ ID NO: 95, SEQ ID NO: 97-SEQ ID NO: 128, SEQ ID NO: 220-SEQ ID NO: 222, or SEQ ID NO: 1-SEQ ID NO: 64) to form a selective depletion complex. In another example, a linker (e.g., any one of SEQ ID NO: 129-SEQ ID NO: 141 or SEQ ID NO: 195-SEQ ID NO: 218) can connect the C-terminus of a half-life extending peptide (e.g., SEQ ID NO: 178, SEQ ID NO: 179, or SEQ ID NO: 192) to the N-terminus of a target-binding peptide and a second linker (e.g., any one of SEQ ID NO: 129-SEQ ID NO: 141 or SEQ ID NO: 195-SEQ ID NO: 218) can connect the C-terminus of the target-binding peptide to the N-terminus of a TfR-binding peptide (e.g., any one of SEQ ID NO: 96, SEQ ID NO: 65-SEQ ID NO: 95, SEQ ID NO: 97-SEQ ID NO: 128, SEQ ID NO: 220-SEQ ID NO: 222, or SEQ ID NO: 1-SEQ ID NO: 64) to form a selective depletion complex.

[0255] In some embodiments, a linker can comprise a Tau-theraphotoxin-Hs1a, also known as DkTx (double-knot toxin), extracted from a native knottin-knottin dimer from Haplopelma schmidti (e.g., SEQ ID NO: 139). The linker can lack structural features that would interfere with dimerizing independently functional CDPs (e.g., a TfR-binding CDP and a target-binding CDP). In some embodiments, a linker can comprise a glycine-serine (Gly-Ser or GS) linker (e.g., SEQ ID NO: 129-SEQ ID NO: 138 or SEQ ID NO: 141 or SEQ ID NO: 195-SEQ ID NO: 218). Gly-Ser linkers can have minimal chemical reactivity and can impart flexibility to the linker. Serines can increase the solubility of the linker or the peptide complex, as the hydroxyl on the side chain is hydrophilic. In some embodiments, a linker can be derived from a peptide that separates the Fc from the Fv domains in a heavy chain of human immunoglobulin G (e.g., SEQ ID NO: 140). In some embodiments, a linker derived from a peptide from the heavy chain of human IgG can comprise a cysteine to serine mutation relative to the native IgG peptide.

[0256] In some embodiments, peptides of the present disclosure can be dimerized using an immunoglobulin heavy chain Fc domain. These Fc domains can be used to dimerize functional domains (e.g., a TfR-binding peptide and a target-binding peptide), either based on antibodies or other otherwise soluble functional domains. In some embodiments, dimerization can be homodimeric if the Fc sequences are native. In some embodiments, dimerization can be heterodimeric by mutating the Fc domain to generate a “knob-in-hole” format where one Fc CH3 domain contains novel residues (knob) designed to fit into a cavity (hole) on the other Fc CH3 domain. A first peptide domain (e.g., a TfR-binding peptide or a target-binding peptide) can be coupled to the knob, and a second peptide domain (e.g., a TfR-binding peptide or target-binding peptide) can be coupled to the hole. Knob+knob dimers can be highly energetically unfavorable. A purification tag can be added to the “knob” side to remove hole+hole dimers and select for knob+hole dimers.

[0257] The peptide peptides of the present disclosure (e.g., the target-binding peptides, TfR-binding peptides, or selective depletion complexes) can be linked to another peptide (e.g., a target-binding peptide, a TfR-binding peptide, a selective depletion complex, or a half-life modifying peptide) at the N-terminus or C-terminus. In some embodiments, one or more peptides can be linked or fused via a peptide linker (e.g., a peptide linker comprising a sequence of any one of SEQ ID NO: 129-SEQ ID NO: 141 or SEQ ID NO: 195-SEQ ID NO: 218). For example, a TfR-binding peptide can be fused to a target-binding peptide via a peptide linker of any one of SEQ ID NO: 129-SEQ ID NO: 141 or SEQ ID NO: 195-SEQ ID NO: 218. A peptide linker (e.g., a linker connecting a TfR-binding peptide, a target-binding peptide, a half-life modifying peptide, or combinations thereof) can have a length of about 2, about 3, about 4, about 5, about 6, about 7, about 8, about 9, about 10, about 11, about 12, about 13, about 14, about 15, about 16, about 17, about 18, about 19, about 20, about 21, about 22, about 23, about 24, about 25, about 30, about 35, about 40, about 45, or about 50 amino acid residues. A peptide linker (e.g., a linker connecting a TfR-binding peptide, a target-binding peptide, a half-life modifying peptide, or combinations thereof) can have a length of from about 2 to about 5, from about 2 to about 10, from about 2 to about 20, from about 3 to about 5, from about 3 to about 10, from about 3 to about 15, from about 3 to about 20, from about 3 to about 25, from about 5 to about 10, from about 5 to about 15, from about 5 to about 20, from about 5 to about 25, from about 10 to about 15, from about 10 to about 20, from about 10 to about 25, from about 15 to about 20, from about 15 to about 25, from about 20 to about 25, from about 20 to about 30, from about 20 to about 35, from about 20 to about 40, from about 20 to about 45, from about 20 to about 50, from about 3 to about 50, from about 3 to about 40, from about 3 to about 30, from about 10 to about 40, from about 10 to about 30, from about 50 to about 100, from about 100 to about 200, from about 200 to about 300, from about 300 to about 400, from about 400 to about 500, or from about 500 to about 600 amino acid residues.

[0258] In some embodiments, a first peptide (e.g., a TfR-binding peptide) and a second peptide (e.g., a target-binding peptide) can be connected by a flexible peptide linker. A flexible linker can provide rotational freedom between the first peptide and the second peptide and can allow the first peptide and the second peptide to bind their respective targets (e.g., a transferrin receptor and a target molecule) with minimal strain. In some embodiments, a peptide linker can have a persistence length of no more than 6 Å, no more than 7 Å, no more than 8 Å, no more than 9 Å, no more than 10 Å, no more than 12 Å, no more than 15 Å, no more than 20 Å, no more than 25 Å, no more than 30 Å, no more than 40 Å, or no more than 50 Å. In some embodiments, a peptide linker can have a persistence length of from about 4 Å to about 100 Å, from about 4 Å to about 50 Å, from about 4 Å to about 20 Å, from about 4 Å to about 10 Å, from about 10 Å to about 20 Å, from about 20 Å to about 30 Å, from about 30 Å to about 50 Å, or from about 50 Å to about 100 Å. The persistence length of the linker can be a measure of the flexibility of the peptide linker and can be quantified as the peptide length over which correlations in the direction of the tangent are lost.

[0259] In some embodiments, a peptide linker can be selected based on a desired linker length, hydrodynamic radius, chromatographic mobility, posttranslational modification propensity, or combinations thereof. In some embodiments, a linker separating two or more functional domains of a peptide complex (e.g., separating a TfR-binding peptide and a target-binding peptide) can comprise a large, stable, globular domain, for example to reduce a propensity for glomerular filtration. In some embodiments, a linker separating two or more functional domains of a peptide complex (e.g., separating a TfR-binding peptide and a target-binding peptide) can comprise a small, flexible linker, for example to reduce the hydrodynamic radius of the complex for use in tight spaces like dense-core tumor stroma. Examples of selective depletion complexes formed from a single polypeptide chain comprising a target-binding peptide and a receptor-binding peptide connected via a peptide linker are illustrated in FIG. 25A and FIG. 25B. In some embodiments, a peptide linker can support independent folding of the two or more functional domains and may not inhibit interactions between the two or more functional domains and their binding targets (e.g., between a TfR-binding peptide and TfR or between a target-binding peptide and a target molecule).

[0260] In some embodiments, a peptide can be appended to the N-terminus of any peptide of the present disclosure following an N-terminal GS dipeptide and preceding, for example, a GGGS (SEQ ID NO: 129) spacer. In some embodiments, a peptide (e.g., a target-binding peptide) can be appended to either the N-terminus or C-terminus of any peptide disclosed herein (e.g., a TfR-binding peptide) using a peptide linker such as GₓS_{y} (SEQ ID NO: 130) peptide linker, wherein x and y can be any whole number, such as 1, 2, 3, 4, 5, 6, 7, 8, 9, and 10. In some embodiments, the peptide linker comprises (GS)x (SEQ ID NO: 131), wherein x can be any whole number, such as 1, 2, 3, 4, 5, 6, 7, 8, 9, and 10. In some embodiments, the peptide linker comprises GGSSG (SEQ ID NO: 132), GGGGG (SEQ ID NO: 133), GSGSGSGS (SEQ ID NO: 134), GSGG (SEQ ID NO: 135), GGGGS (SEQ ID NO: 136), GGGS (SEQ ID NO: 129), GGS (SEQ ID NO: 137), GGGSGGGSGGGS (SEQ ID NO: 138), or a variant or fragment thereof. Additionally, KKYKPYVPVTTN (SEQ ID NO: 139) from DkTx, and EPKSSDKTHT (SEQ ID NO: 140) from human IgG3 can be used as a peptide linker. In some embodiments, the peptide linker comprises GGGSGGSGGGS (SEQ ID NO: 141). In some embodiments, the peptide linker comprises a linker of any one of SEQ ID NO: 195-SEQ ID NO: 218. Examples of peptide linkers compatible with the target depletion complexes of the present disclosure are provided in TABLE 4. It is understood that any of the foregoing linkers or a variant or fragment thereof can be used with any number of repeats or any combinations thereof. It is also understood that other peptide linkers in the art or a variant or fragment thereof can be used with any number of repeats or any combinations thereof.

[0261] In some embodiments, a tag peptide (e.g., a peptide of any one of SEQ ID NO: 142-SEQ ID NO: 147) can be appended to the peptide (e.g., a target-binding peptide, a TfR-binding peptide, or a selective depletion complex) at any amino acid residue. In further embodiments, the tag peptide (e.g., a peptide of any one of SEQ ID NO: 142-SEQ ID NO: 147) can be appended to the peptide at any amino acid residue without interfering with TfR-binding activity, target-binding activity, selective depletion activity, or a combination thereof. In some embodiments, the tag peptide is appended via conjugation, linking, or fusion techniques. In other embodiments, a peptide (e.g., a target-binding peptide) can be appended to a second peptide (e.g., a TfR-binding peptide) at any amino acid residue. In further embodiments, the peptide (e.g., a target-binding peptide) can be appended to the second peptide (e.g., a TfR-binding peptide) at any amino acid residue without interfering with TfR-binding activity, target-binding activity, selective depletion activity, or a combination thereof. In some embodiments, the peptide is appended via conjugation, linking, or fusion techniques. In other embodiments, the peptide (e.g., a target binding peptide) can be appended to the second peptide (e.g., a TfR-binding peptide) at any amino acid residue.

TABLE 4
Peptide Linkers

| SEQ ID NO | Sequence |
|---|---|
| SEQ ID NO: 129 | GGGS |
| SEQ ID NO: 130 | GₓS_{y} |
| SEQ ID NO: 131 | (GS)x |
| SEQ ID NO: 132 | GGSSG |
| SEQ ID NO: 133 | GGGGG |
| SEQ ID NO: 134 | GSGSGSGS |
| SEQ ID NO: 135 | GSGG |
| SEQ ID NO: 136 | GGGGS |
| SEQ ID NO: 137 | GGS |
| SEQ ID NO: 138 | GGGSGGGSGGGS |
| SEQ ID NO: 139 | KKYKPYVPVTTN |
| SEQ ID NO: 140 | EPKSSDKTHT |
| SEQ ID NO: 141 | GGGSGGSGGGS |
| SEQ ID NO: 195 | AGSGGSGGSGGSPVPSTPPTNSSSTPPTPSPSPVPSTPPTNSSSTPPTP |
| | SPSPVPSTPPTNSSSTPPTPSPSAS |
| SEQ ID NO: 196 | AGSGGSGGSGGSPVPSTPPTPSPSTPPTPSPSPVPSTPPTNSSSTPPTP |
| | SPSPVPSTPPTPSPSTPPTPSPSAS |
| SEQ ID NO: 197 | AGSGGSGGSGGSPVPSTPPTPSPSTPPTPSPSGGSGNSSGSGGSPVPS |
| | TPPTPSPSTPPTPSPSAS |
| SEQ ID NO: 198 | AGSGGSGGSGGSPVPSTPPTPSPSTPPTPSPSPVPSTPPTPSPSTPPTPS |
| | PSPVPSTPPTPSPSTPPTPSPSAS |
| SEQ ID NO: 199 | AGSGGSGGSGGSPVPSTPPTPSPSTPPTPSPSIQRTPKIQVYSRHPAE |
| | NGKSNFLNCYVSGFHPSDIEVDLLKNGERIEKVEHSDLSFSKDWSF |
| | YLLYYTEFTPTEKDEYACRVNHVTLSQPKIVKWDRDPVPSTPPTPS |
| | PSTPPTPSPSAS |
| SEQ ID NO: 200 | AGSGGSGGSGGSPVPSTPPTPSPSTPPTPSPSIQRTPKIQVYSRHPAE |
| | NGKSNFLNCYVSGFHPSDIEVDLLKNGERIEKVEHSDLSFSKDWSF |
| | YLLYYTEFTPTEKDEYACRVNHVTLSQPKIVKWDRDGGSGGSGGS |
| | GGSAS |
| SEQ ID NO: 201 | AGPVPSTPPTPSPSTPPTPSPSIQRTPKIQVYSRHPAENGKSNFLNCY |
| | VSGFHPSDIEVDLLKNGERIEKVEHSDLSFSKDWSFYLLYYTEFTPT |
| | EKDEYACRVNHVTLSQPKIVKWDRDGGSGGSGGSGGSIQRTPKIQ |
| | VYSRHPAENGKSNFLNCYVSGFHPSDIEVDLLKNGERIEKVEHSDL |
| | SFSKDWSFYLLYYTEFTPTEKDEYACRVNHVTLSQPKIVKWDRDG |
| | GSGGSGGSGAS |
| SEQ ID NO: 202 | AGSGGSGGSGGSPVPSTPPTPSPSTPPTPSPSIQRTPKIQVYSRHPAE |
| | NGKSNFLNCYVSGFHPSDIEVDLLKNGERIEKVEHSDLSFSKDWSF |
| | YLLYYTEFTPTEKDEYACRVNHVTLSQPKIVKWDRDGGSGGSGGS |
| | GGSIQRTPKIQVYSRHPAENGKSNFLNCYVSGFHPSDIEVDLLKNG |
| | ERIEKVEHSDLSFSKDWSFYLLYYTEFTPTEKDEYACRVNHVTLSQ |
| | PKIVKWDRDPVPSTPPTPSPSTPPTPSPSAS |
| SEQ ID NO: 203 | AGSGGSGGSGGSPVPSTPPTPSPSTPPTPSPSQIFVKTLTGKTITLEV |
| | EPSDTIENVKAKIQDKEGIPPDQQRLIFAGKQLEDGRTLSDYNIQKE |
| | STLHLVLRLRGGGGSGGSGGSGGSAS |
| SEQ ID NO: 204 | AGSGGSGGSGGSPVPSTPPTPSPSTPPTPSPSDGRYSLTYIYTGLSKH |
| | VEDVPAFQALGSLNDLQFFRYNSKDRKSQPMGLWRQVEGMEDW |
| | KQDSQLQKAREDIFMETLKDIVEYYNDSNGSHVLQGRFGCEIENN |
| | RSSGAFWKYYYDGKDYIEFNKEIPAWVPFDPAAQITKQKWEAEPV |
| | YVQRAKAYLEEECPATLRKYLKYSKNILDRQDPPSVVVTSHQAPG |
| | EKKKLKCLAYDFYPGKIDVHWTRAGEVQEPELRGDVLHNGNGTY |
| | QSWVVVAVPPQDTAPYSCHVQHSSLAQPLVVPWEASPVPSTPPTP |
| | SPSTPPTPSAS |
| SEQ ID NO: 205 | AGSGGSGGSGGSGGSGGSGGSGGSDGRYSLTYIYTGLSKHVEDVP |
| | AFQALGSLNDLQFFRYNSKDRKSQPMGLWRQVEGMEDWKQDSQ |
| | LQKAREDIFMETLKDIVEYYNDSNGSHVLQGRFGCEIENNRSSGAF |
| | WKYYYDGKDYIEFNKEIPAWVPFDPAAQITKQKWEAEPVYVQRA |
| | KAYLEEECPATLRKYLKYSKNILDRQDPPSVVVTSHQAPGEKKKL |
| | KCLAYDFYPGKIDVHWTRAGEVQEPELRGDVLHNGNGTYQSWV |
| | VVAVPPQDTAPYSCHVQHSSLAQPLVVPWEASGGSGGSGGSGGS |
| | DGRYSLTYIYTGLSKHVEDVPAFQALGSLNDLQFFRYNSKDRKSQ |
| | PMGLWRQVEGMEDWKQDSQLQKAREDIFMETLKDIVEYYNDSN |
| | GSHVLQGRFGCEIENNRSSGAFWKYYYDGKDYIEFNKEIPAWVPF |
| | DPAAQITKQKWEAEPVYVQRAKAYLEEECPATLRKYLKYSKNILD |
| | RQDPPSVVVTSHQAPGEKKKLKCLAYDFYPGKIDVHWTRAGEVQ |
| | EPELRGDVLHNGNGTYQSWVVVAVPPQDTAPYSCHVQHSSLAQP |
| | LVVPWEASPVPSTPPTPSPSTPPTPSPSAS |
| SEQ ID NO: 206 | AGSGNSSGSGGSGGSGNSSGSGGSPVPSTPPTPSPSTPPTPSPSAS |
| SEQ ID NO: 207 | KLSGGGGSGGGGSGGGGSAEAWYNLGNAYYKQGDYQKAIEYYQ |
| | KALELDPNNAEAWYNLGNAYYKQGDYQKAIEYYQKALELDPNN |
| | AEAWYNLGNAYYKQGDYQKAIEDYQKALELDPNNLQRSAGGGG |
| | SGGGGSGGGGAS |
| SEQ ID NO: 208 | KLSGGGGSGGGGSGGGGSAEAWYNLGNAYYKQGDYQKAIEYYQ |
| | KALELDPNNAEAWYNLGNAYYKQGDYQKAIEYYQKALELDPNN |
| | AEAWYNLGNAYYKQGDYQKAIEDYQKALELDPNNLQAEAWKN |
| | LGNAYYKQGDYQKAIEYYQKALELDPNNASAWYNLGNAYYKQG |
| | DYQKAIEYYQKALELDPNNAKAWYRRGNAYYKQGDYQKAIEDY |
| | QKALELDPNNRSRSAGGGGSGGGGSGGGGAS |
| SEQ ID NO: 209 | KLSGGGGSGGGGSGGGGSAEAWYNLGNAYYKQGDYQKAIEYYQ |
| | KALELDPNNAEAWYNLGNAYYKQGDYQKAIEYYQKALELDPNN |
| | AEAWYNLGNAYYKQGDYQKAIEDYQKALELDPNNLQAEAWKN |
| | LGNAYYKQGDYQKAIEYYQKALELDPNNASAWYNLGNAYYKQG |
| | DYQKAIEYYQKALELDPNNAKAWYRRGNAYYKQGDYQKAIEDY |
| | QKALELDPNNRSAEAWYNLGNAYYKQGDYQKAIEYYQKALELD |
| | PNNAEAWYNLGNAYYKQGDYQKAIEYYQKALELDPNNAEAWY |
| | NLGNAYYKQGDYQKAIEDYQKALELDPNNLQRSAGGGGSGGGG |
| | SGGGGAS |
| SEQ ID NO: 210 | KLSGGGGSGGGGGGGGSAEAWYNLGNAYYKQGDYQKAIEYYQ |
| | KALELDPNNAEAWYNLGNAYYKQGDYQKAIEYYQKALELDPNN |
| | AEAWYNLGNAYYKQGDYQKAIEDYQKALELDPNNLQAEAWKN |
| | LGNAYYKQGDYQKAIEYYQKALELDPNNASAWYNLGNAYYKQG |
| | DYQKAIEYYQKALELDPNNAKAWYRRGNAYYKQGDYQKAIEDY |
| | QKALELDPNNRSAEAWYNLGNAYYKQGDYQKAIEYYQKALELD |
| | PNNAEAWYNLGNAYYKQGDYQKAIEYYQKALELDPNNAEAWY |
| | NLGNAYYKQGDYQKAIEDYQKALELDPNNLQAEAWKNLGNAYY |
| | KQGDYQKAIEYYQKALELDPNNASAWYNLGNAYYKQGDYQKAI |
| | EYYQKALELDPNNAKAWYRRGNAYYKQGDYQKAIEDYQKALEL |
| | DPNNRSAGGGGSGGGGSGGGGAS |
| SEQ ID NO: 211 | GGGGSAS |
| SEQ ID NO: 212 | GGGGSGGGGSAS |
| SEQ ID NO: 213 | GGGGSGGGGSGGGGSAS |
| SEQ ID NO: 214 | GGGGSGGGGSGGGGSGGGGSGGGGSAS |
| SEQ ID NO: 215 | GGGGSGGGGSGGGGSGGGGSGGGGSGGGGSAS |
| SEQ ID NO: 216 | AGGGSGGGGSGGGGSGGGGSGGGGSGGGGSGGGGSAS |
| SEQ ID NO: 217 | AGGGSGGGGSGGGGSGGGGSGGGGSGGGGSGGGGSGGGGSAS |
| SEQ ID NO: 218 | AGGGSGGGGSGGGGSGGGGSGGGGSGGGGSGGGGSGGGGSGGGGSAS |
| SEQ ID NO: 223 | GGGGSGGGGSGGGGS |
| SEQ ID NO: 224 | GGGGSGGGGSGGGGSGGGGS |
| SEQ ID NO: 225 | GGGGS |
| SEQ ID NO: 226 | GSPVPSTPPTPSPSTPPTPSPSAS |
| SEQ ID NO: 227 | LKEAKEKAIEELKKAGITSDYYFDLINKAKAVEGVNALKDEILKA |
| SEQ ID NO: 194 | LKEAKEKAIEELKKAGITSDYYFDLINKAKTVEGVNALKDEILKA |
| SEQ ID NO: 391 | PVPSTPPTPSPSTPPTPSPS |

[0262] In some embodiments, a selective depletion complex may comprise two or more polypeptide chains. For example, a target-binding peptide and a receptor-binding peptide may be complexed via a dimerization domain to form a selective depletion complex. The dimerization domain may be a heterodimerization domain or a homodimerization domain. Examples of selective depletion complexes comprising a target-binding peptide and a receptor-binding peptide connected via a dimerization domain (e.g., an Fc homodimerization domain or a knob-in-hole heterodimerization domain) are illustrated in FIG. 25A, FIG. 25B, and FIG. 25C.

[0263] A target-binding peptide and a receptor-binding peptide may be complexed by forming a heterodimer via a heterodimerization domain. The target-binding peptide may be linked or fused to a first heterodimerization domain and the receptor-binding peptide may be linked or fused to a second heterodimerization domain. The first heterodimerization domain may bind to the second heterodimerization domain to form a heterodimeric complex comprising the target-binding peptide and the receptor-binding peptide. For example, the receptor-binding peptide may be linked or fused to an Fc “knob” peptide (e.g., SEQ ID NO: 260) and the immune cell targeting agent may be linked or fused to an Fc “hole” peptide (e.g., SEQ ID NO: 261). In another example, the receptor-binding peptide may be linked or fused to an Fc “hole” peptide (e.g., SEQ ID NO: 261) and the target-binding may be linked or fused to an Fc “knob” peptide (e.g., SEQ ID NO: 260). In some embodiments, a receptor-binding peptide (e.g., any one of SEQ ID NO: 1-SEQ ID NO: 222) may form a heterodimer with target-binding peptide via a heterodimerization domain provided in TABLE 5. For example, the receptor-binding peptide may be fused to chain 1 of an Fc pair (e.g., SEQ ID NO: 260) and the target-binding peptide may be fused to chain 2 of the Fc pair (e.g., SEQ ID NO: 261). In another example, the receptor-binding peptide may be fused to chain 2 of an Fc pair (e.g., SEQ ID NO: 263) and the target-binding peptide may be fused to chain 1 of the Fc pair (e.g., SEQ ID NO: 262). A selective depletion complex comprising a heterodimerization domain may form a monovalent selective depletion complex, as shown in FIG. 25B, or a selective depletion complex comprising a heterodimerization domain may form a multivalent selective depletion complex, as shown in FIG. 25C.

TABLE 5
Exemplary Heterodimerization Domains

| Name | SEQ ID NO | Sequence |
|---|---|---|
| Chain 1 | SEQ ID NO: 260 | EPKSCDKTHTCPPCPAPELLGGPSVFLFPPKPKDTLMISRTPE |
| Pair 1 | | VTCVVVDVSHEDPEVKFNWYVDGVEVHNAKTKPREEQYNS |
| | | TYRVVSVLTVLHQDWLNGKEYKCKVSNKALPAPIEKTISKA |
| | | KGQPREPQVYTLPPSRDELTKNQVSLWCLVKGFYPSDIAVE |
| | | WESNGQPENNYKTTPPVLDSDGSFFLYSKLTVDKSRWQQGN |
| | | VFSCSVMHEALHNHYTQKSLSLSPGK |
| Chain 2 | SEQ ID NO: 261 | EPKSCDKTHTCPPCPAPELLGGPSVFLFPPKPKDTLMISRTPE |
| Pair 1 | | VTCVVVDVSHEDPEVKFNWYVDGVEVHNAKTKPREEQYNS |
| | | TYRVVSVLTVLHQDWLNGKEYKCKVSNKALPAPIEKTISKA |
| | | KGQPREPQVYTLPPSRDELTKNQVSLSCAVKGFYPSDIAVEW |
| | | ESNGQPENNYKTTPPVLDSDGSFFLVSKLTVDKSRWQQGNV |
| | | FSCSVMHEALHNHYTQKSLSLSPGK |
| Chain 1 | SEQ ID NO: 262 | EPKSCDKTHTCPPCPAPELLGGPSVFLFPPKPKDTLMISRTPE |
| Pair 2 | | VTCVVVDVSHEDPEVKFNWYVDGVEVHNAKTKPREEQYNS |
| | | TYRVVSVLTVLHQDWLNGKEYKCKVSNKALPAPIEKTISKA |
| | | KGQPREPQVYTLPPCRDELTKNQVSLWCLVKGFYPSDIAVE |
| | | WESNGQPENNYKTTPPVLDSDGSFFLYSKLTVDKSRWQQGN |
| | | VFSCSVMHEALHNHYTQKSLSLSPGK |
| Chain 2 | SEQ ID NO: 263 | EPKSCDKTHTCPPCPAPELLGGPSVFLFPPKPKDTLMISRTPE |
| Pair 2 | | VTCVVVDVSHEDPEVKFNWYVDGVEVHNAKTKPREEQYNS |
| | | TYRVVSVLTVLHQDWLNGKEYKCKVSNKALPAPIEKTISKA |
| | | KGQPREPQVCTLPPSRDELTKNQVSLSCAVKGFYPSDIAVEW |
| | | ESNGQPENNYKTTPPVLDSDGSFFLVSKLTVDKSRWQQGNV |
| | | FSCSVMHEALHNHYTQKSLSLSPGK |
| Chain 1 | SEQ ID NO: 264 | EPKSCDKTHTCPPCPAPELLGGPSVFLFPPKPKDTLMISRTPE |
| Pair 3 | | VTCVVVDVSHEDPEVKFNWYVDGVEVHNAKTKPREEQYNS |
| | | TYRVVSVLTVLHQDWLNGKEYKCKVSNKALPAPIEKTISKA |
| | | KGQPREPQVYTLPPSRDELTKNQVSLTCLVKGFYPSDIAVEW |
| | | ESNGQPENNYDTTPPVLDSDGSFFLYSDLTVDKSRWQQGNV |
| | | FSCSVMHEALHNHYTQKSLSLSPGK |
| Chain 2 | SEQ ID NO: 265 | EPKSCDKTHTCPPCPAPELLGGPSVFLFPPKPKDTLMISRTPE |
| Pair 3 | | VTCVVVDVSHEDPEVKFNWYVDGVEVHNAKTKPREEQYNS |
| | | TYRVVSVLTVLHQDWLNGKEYKCKVSNKALPAPIEKTISKA |
| | | KGQPREPQVYTLPPSRKELTKNQVSLTCLVKGFYPSDIAVEW |
| | | ESNGQPENNYKTTPPVLKSDGSFFLYSKLTVDKSRWQQGNV |
| | | FSCSVMHEALHNHYTQKSLSLSPGK |
| Chain 1 | SEQ ID NO: 266 | EPKSCDKTHTCPPCPAPELLGGPSVFLFPPKPKDTLMISRTPE |
| Pair 4 | | VTCVVVDVSHEDPEVKFNWYVDGVEVHNAKTKPREEQYNS |
| | | TYRVVSVLTVLHQDWLNGKEYKCKVSNKALPAPIEKTISKA |
| | | KGQPREPQVYTLPPSRDELTKNQVHLTCLVKGFYPSDIAVEW |
| | | ESNGQPENNYKTTPPVLDSDGSFALYSKLTVDKSRWQQGNV |
| | | FSCSVMHEALHNHYTQKSLSLSPGK |
| Chain 2 | SEQ ID NO: 267 | EPKSCDKTHTCPPCPAPELLGGPSVFLFPPKPKDTLMISRTPE |
| Pair 4 | | VTCVVVDVSHEDPEVKFNWYVDGVEVHNAKTKPREEQYNS |
| | | TYRVVSVLTVLHQDWLNGKEYKCKVSNKALPAPIEKTISKA |
| | | KGQPREPQVTTLPPSRDELTKNQVSLTCLVKGFYPSDIAVEW |
| | | ESNGQPENNYKTFPPVLDSDGSFFLYSKLTVDKSRWQQGNV |
| | | FSCSVMHEALHNHYTQKSLSLSPGK |
| Chain 1 | SEQ ID NO: 268 | EPKSCEKTHTCPECPAPELLGGPSVFLFPPKPKDTLMISRTPEV |
| Pair 5 | | TCVVVDVSHEDPEVKFNWYVDGVEVHNAKTKPREEQYNST |
| | | YRVVSVLTVLHQDWLNGKEYKCKVSNKALPAPIEKTISKAK |
| | | GQPREPQVYTLPPSRDELTKNQVSLTCEVKGFYPSDIAVEWE |
| | | SNGQPENNYKTTPPVLDSDGSFFLYSKLTVDKSRWQQGNVF |
| | | SCSVMHEALHNHYTQKSLSLSPGK |
| Chain 2 | SEQ ID NO: 269 | EPKSCRKTHTCPRCPAPELLGGPSVFLFPPKPKDTLMISRTPE |
| Pair 5 | | VTCVVVDVSHEDPEVKFNWYVDGVEVHNAKTKPREEQYNS |
| | | TYRVVSVLTVLHQDWLNGKEYKCKVSNKALPAPIEKTISKA |
| | | KGQPREPQVYTLPPSRDELTKNQVSLTCLVKGFYPSDIAVEW |
| | | ESNGQPENNYKTTPPVLDSDGSFFLYSRLTVDKSRWQQGNV |
| | | FSCSVMHEALHNHYTQKSLSLSPGK |
| Chain 1 | SEQ ID NO: 270 | EPKSCDKTHTCPPCPAPELLGGPSVFLFPPKPKDTLMISRTPE |
| Pair 6 | | VTCVVVDVSHEDPEVKFNWYVDGVEVHNAKTKPREEQYNS |
| | | TYRVVSVLTVLHQDWLNGKEYKCKVSNKALPAPIEKTISKA |
| | | KGQPREPQVYTLPPSRDELTKNQVSLTCLVKGFYPSDIAVEW |
| | | ESNGQPENNYKTTPPVLDSDGSFLLYSKLTVDKSRWQQGNV |
| | | FSCSVMHEALHNHYTQKSLSLSPGK |
| Chain 2 | SEQ ID NO: 271 | EPKSCDKTHTCPPCPAPELLGGPSVFLFPPKPKDTLMISRTPE |
| Pair 6 | | VTCVVVDVSHEDPEVKFNWYVDGVEVHNAKTKPREEQYNS |
| | | TYRVVSVLTVLHQDWLNGKEYKCKVSNKALPAPIEKTISKA |
| | | KGQPREPQVYTLPPSRDELTKNQVSLTCLVKGFYPSDIAVEW |
| | | ESNGQPENNYKTTPPVLDSDGSFFLYSRLTVDKSRWQQGNV |
| | | FSCSVMHEALHNHYTQKSLSLSPGK |
| Chain 1 | SEQ ID NO: 272 | EPKSCDKTHTCPPCPAPELLGGPSVFLFPPKPKDTLMISRTPE |
| Pair 7 | | VTCVVVDVSHEDPEVKFNWYVDGVEVHNAKTKPREEQYNS |
| | | TYRVVSVLTVLHQDWLNGKEYKCKVSNKALPAPIEKTISKA |
| | | KGQPREPQVYVLPPSRDELTKNQVSLLCLVKGFYPSDIAVEW |
| | | ESNGQPENNYLTWPPVLDSDGSFFLYSKLTVDKSRWQQGNV |
| | | FSCSVMHEALHNHYTQKSLSLSPGK |
| Chain 2 | SEQ ID NO: 273 | EPKSCDKTHTCPPCPAPELLGGPSVFLFPPKPKDTLMISRTPE |
| Pair 7 | | VTCVVVDVSHEDPEVKFNWYVDGVEVHNAKTKPREEQYNS |
| | | TYRVVSVLTVLHQDWLNGKEYKCKVSNKALPAPIEKTISKA |
| | | KGQPREPQVYVYPPSRDELTKNQVSLTCLVKGFYPSDIAVE |
| | | WESNGQPENNYKTTPPVLDSDGSFALVSKLTVDKSRWQQG |
| | | NVFSCSVMHEALHNHYTQKSLSLSPGK |
| Chain 1 | SEQ ID NO: 274 | EPKSCDKTHTCPPCPAPELLGGPSVFLFPPKPKDTLMISRTPE |
| Pair 8 | | VTCVVVDVSHEDPEVKFNWYVDGVEVHNAKTKPREEQYNS |
| | | TYRVVSVLTVLHQDWLNGKEYKCKVSNKALPAPIEKTISKA |
| | | KGQPREPQVYTLPPSRDELTENQVSLTCLVKGFYPSDIAVEW |
| | | ESNGQPENNYKTTPPVLDSDGSFFLYSWLTVDKSRWQQGNV |
| | | FSCSVMHEALHNHYTQKSLSLSPGK |
| Chain 2 | SEQ ID NO: 275 | EPKSCDKTHTCPPCPAPELLGGPSVFLFPPKPKDTLMISRTPE |
| Pair 8 | | VTCVVVDVSHEDPEVKFNWYVDGVEVHNAKTKPREEQYNS |
| | | TYRVVSVLTVLHQDWLNGKEYKCKVSNKALPAPIEKTISKA |
| | | KGQPREPRVYTLPPSRDELTKNQVSLTCLVKGFYPSDIAVEW |
| | | ESNGQPENNYKTTPPVLVSDGSFTLYSKLTVDKSRWQQGNV |
| | | FSCSVMHEALHNHYTQKSLSLSPGK |
| Chain 1 | SEQ ID NO: 276 | EPKSCDKTHTCPPCPAPELLGGPSVFLFPPKPKDTLMISRTPE |
| Pair 9 | | VTCVVVDVSHEDPEVKFNWYVDGVEVHNAKTKPREEQYNS |
| | | TYRVVSVLTVLHQDWLNGKEYKCKVSNKALPAPIEKTISKA |
| | | KGQPREPQVCTLPPSRDELTENQVSLTCLVKGFYPSDIAVEW |
| | | ESNGQPENNYKTTPPVLDSDGSFFLYSWLTVDKSRWQQGNV |
| | | FSCSVMHEALHNHYTQKSLSLSPGK |
| Chain 2 | SEQ ID NO: 277 | EPKSCDKTHTCPPCPAPELLGGPSVFLFPPKPKDTLMISRTPE |
| Pair 9 | | VTCVVVDVSHEDPEVKFNWYVDGVEVHNAKTKPREEQYNS |
| | | TYRVVSVLTVLHQDWLNGKEYKCKVSNKALPAPIEKTISKA |
| | | KGQPREPRVYTLPPCRDELTKNQVSLTCLVKGFYPSDIAVEW |
| | | ESNGQPENNYKTTPPVLVSDGSFTLYSKLTVDKSRWQQGNV |
| | | FSCSVMHEALHNHYTQKSLSLSPGK |
| Chain 1 | SEQ ID NO: 278 | EPKSCDKTHTCPPCPAPELLGGPSVFLFPPKPKDTLMISRTPE |
| Pair 10 | | VTCVVVDVSHEDPEVKFNWYVDGVEVHNAKTKPREEQYNS |
| | | TYRVVSVLTVLHQDWLNGKEYKCKVSNKALPAPIEKTISKA |
| | | KGQPREPQVYTLPPSRDELTKNQVSLTCLVEGFYPSDIAVEW |
| | | ESNGQPENNYKTTPPVLDSDGSFFLYSWLTVDKSRWQQGNV |
| | | FSCSVMHEALHNHYTQKSLSLSPGK |
| Chain 2 | SEQ ID NO: 279 | EPKSCDKTHTCPPCPAPELLGGPSVFLFPPKPKDTLMISRTPE |
| Pair 10 | | VTCVVVDVSHEDPEVKFNWYVDGVEVHNAKTKPREEQYNS |
| | | TYRVVSVLTVLHQDWLNGKEYKCKVSNKALPAPIEKTISKA |
| | | KGQPREPQVYTLPPSRDNLTKNQVSLTCLVKGFYPSDIAVEW |
| | | ESNGQPENNYKTTPPVLVSDGSFTLYSKLTVDKSRWQQGNV |
| | | FSCSVMHEALHNHYTQKSLSLSPGK |
| Chain 1 | SEQ ID NO: 280 | EPKSCDKTHTCPPCPAPELLGGPSVFLFPPKPKDTLMISRTPE |
| Pair 11 | | VTCVVVDVSHEDPEVKFNWYVDGVEVHNAKTKPREEQYNS |
| | | TYRVVSVLTVLHQDWLNGKEYKCKVSNKALPAPIEKTISKA |
| | | KGQPREPQVYTLPPSRDELTDNQVSLTCLVKGFYPSDIAVEW |
| | | ESNGQPENNYKTTPPVLMSDGSFFLASKLTVDKSRWQQGNV |
| | | FSCSVMHEALHNHYTQKSLSLSPGK |
| Chain 2 | SEQ ID NO: 281 | EPKSCDKTHTCPPCPAPELLGGPSVFLFPPKPKDTLMISRTPE |
| Pair 11 | | VTCVVVDVSHEDPEVKFNWYVDGVEVHNAKTKPREEQYNS |
| | | TYRVVSVLTVLHQDWLNGKEYKCKVSNKALPAPIEKTISKA |
| | | KGQPRRPRVYTLPPSRDELTKNQVSLVCLVKGFYPSDIAVEW |
| | | ESNGQPENNYKTTPPVLDSDGSFFLYSVLTVDKSRWQQGNV |
| | | FSCSVMHEALHNHYTQKSLSLSPGK |
| Chain 1 | SEQ ID NO: 282 | EPKSCDKTHTCPPCPAPELLGGPSVFLFPPKPKDTLMISRTPE |
| Pair 12 | | VTCVVVDVSHEDPEVKFNWYVDGVEVHNAKTKPREEQYNS |
| | | TYRVVSVLTVLHQDWLNGKEYKCKVSNKALPAPIEKTISKA |
| | | KGQPREPQVSTLPPSRDELTKNQVSLMCLVYGFYPSDIAVEW |
| | | ESNGQPENNYKTTPPVLDSDGSFFLYSVLTVDKSRWQQGNV |
| | | FSCSVMHEALHNHYTQKSLSLSPGK |
| Chain 2 | SEQ ID NO: 283 | EPKSCDKTHTCPPCPAPELLGGPSVFLFPPKPKDTLMISRTPE |
| Pair 12 | | VTCVVVDVSHEDPEVKFNWYVDGVEVHNAKTKPREEQYNS |
| | | TYRVVSVLTVLHQDWLNGKEYKCKVSNKALPAPIEKTISKA |
| | | KGQPREPQVYTLPPSRGDLTKNQVQLTCLVKGFYPSDIAVE |
| | | WESNGQPENNYKTTPPVLDSDGSFFLASKLTVDKSRWQQGN |
| | | VFSCSVMHEALHNHYTQKSLSLSPGK |
| Chain 1 | SEQ ID NO: 284 | EPKSCDKTHTCPPCPAPELLGGPSVFLFPPKPKDTLMISRTPE |
| Pair 13 | | VTCVVVDVSHEDPEVKFNWYVDGVEVHNAKTKPREEQYNS |
| | | TYRVVSVLTVLHQDWLNGKEYKCKVSNKALPAPIEKTISKA |
| | | KGQPREPQVYTDPPSRDELTKNQVSLTCEVKGFYPSDIAVEW |
| | | ESNGQPENNYKTTPPVLDSDGSFFLYSKLTVDKSRWQQGNV |
| | | FSCSVMHEALHNHYTQKSLSLSPGK |
| Chain 2 | SEQ ID NO: 285 | EPKSCDKTHTCPPCPAPELLGGPSVFLFPPKPKDTLMISRTPE |
| Pair 13 | | VTCVVVDVSHEDPEVKFNWYVDGVEVHNAKTKPREEQYNS |
| | | TYRVVSVLTVLHQDWLNGKEYKCKVSNKALPAPIEKTISKA |
| | | KGQPREPQVYTKPPSRDELTKNQVSLKCLVKGFYPSDIAVE |
| | | WESNGQPENNYKTTPPVLDSDGSFFLYSKLTVDKSRWQQGN |
| | | VFSCSVMHEALHNHYTQKSLSLSPGK |
| Chain 1 | SEQ ID NO: 286 | EPKSCDKTHTCPPCPAPELLGGPSVFLFPPKPKDTLMISRTPE |
| Pair 14 | | VTCVVVDVSHEDPEVKFNWYVDGVEVHNAKTKPREEQYNS |
| | | TYRVVSVLTVLHQDWLNGKEYKCKVSNKALPAPIEKTISKA |
| | | KGQPREPQVYTLPPSRDELTKNQVSLTCDVSGFYPSDIAVEW |
| | | ESNGQPENNYKTTPPVLDSDGSFFLYSKLTVDKSRWQQGNV |
| | | FSCSVMHEALHNHYTQKSLSLSPGK |
| Chain 2 | SEQ ID NO: 287 | EPKSCDKTHTCPPCPAPELLGGPSVFLFPPKPKDTLMISRTPE |
| Pair 14 | | VTCVVVDVSHEDPEVKFNWYVDGVEVHNAKTKPREEQYNS |
| | | TYRVVSVLTVLHQDWLNGKEYKCKVSNKALPAPIEKTISKA |
| | | KGQPREPQVYTLPPSRDQLTKNQVKLTCLVKGFYPSDIAVE |
| | | WESNGQPENNYKTTPPVLDSDGSFFLYSKLTVDKSRWQQGN |
| | | VFSCSVMHEALHNHYTQKSLSLSPGK |

[0264] In some embodiments, a target-binding peptide and a receptor-binding peptide may form a selective depletion complex comprising a homodimer complexed via a homodimerization domain. The target-binding peptide may be linked or fused to the N-terminus of the homodimerization domain and the receptor-binding peptide may be linked or fused to the C-terminus of the homodimerization domain. In some embodiments, the target-binding peptide may be linked or fused to the C-terminus of the homodimerization domain and the receptor-binding peptide may be linked or fused to the N-terminus of the homodimerization domain. In some embodiments, the target-binding peptide and the receptor-binding peptide may both be fused on the N-terminal, or both be fused on the C-terminal end of the homodimerization domain. A selective depletion complex comprising a homodimerization domain may form a multivalent selective depletion complex, as shown in FIG. 25C. Examples of homodimerization domains that may be used to link or fuse a target-binding peptide to a receptor-binding peptide are provided in TABLE 6.

TABLE 6
Exemplary Homodimerization Domains

| SEQ ID NO | Sequence |
|---|---|
| SEQ ID NO: 245 | EPKSCDKTHTCPPCPAPELLGGPSVFLFPPKPKDTLMISRTPEVTCVVV |
| | DVSHEDPEVKFNWYVDGVEVHNAKTKPREEQYNSTYRVVSVLTVLH |
| | QDWLNGKEYKCKVSNKALPAPIEKTISKAKGQPREPQVYTLPPSRDEL |
| | TKNQVSLTCLVKGFYPSDIAVEWESNGQPENNYKTTPPVLDSDGSFFL |
| | YSKLTVDKSRWQQGNVFSCSVMHEALHNHYTQKSLSLSPGK |
| SEQ ID NO: 246 | EPKSSDKTHTCPPCPAPELLGGPSVFLFPPKPKDTLMISRTPEVTCVVVD |
| | VSHEDPEVKFNWYVDGVEVHNAKTKPREEQYNSTYRVVSVLTVLHQ |
| | DWLNGKEYKCKVSNKALPAPIEKTISKAKGQPREPQVYTLPPSRDELT |
| | KNQVSLTCLVKGFYPSDIAVEWESNGQPENNYKTTPPVLDSDGSFFLY |
| | SKLTVDKSRWQQGNVFSCSVMHEALHNHYTQKSLSLSPGK |
| SEQ ID NO: 247 | EPKSCDKTHTCPPCPAPEAAGGPSVFLFPPKPKDTLMISRTPEVTCVVV |
| | DVSHEDPEVKFNWYVDGVEVHNAKTKPREEQYNSTYRVVSVLTVLH |
| | QDWLNGKEYKCKVSNKALGAPIEKTISKAKGQPREPQVYTLPPSRDEL |
| | TKNQVSLTCLVKGFYPSDIAVEWESNGQPENNYKTTPPVLDSDGSFFL |
| | YSKLTVDKSRWQQGNVFSCSVMHEALHNHYTQKSLSLSPGK |
| SEQ ID NO: 248 | EPKSCDKTHTCPPCPAPELLGGPSVFLFPPKPKDTLMISRTPEVTCVVV |
| | DVSHEDPEVKFNWYVDGVEVHNAKTKPREEQYASTYRVVSVLTVLH |
| | QDWLNGKEYKCKVSNKALPAPIEKTISKAKGQPREPQVYTLPPSRDEL |
| | TKNQVSLTCLVKGFYPSDIAVEWESNGQPENNYKTTPPVLDSDGSFFL |
| | YSKLTVDKSRWQQGNVFSCSVMHEALHNHYTQKSLSLSPGK |
| SEQ ID NO: 249 | EPKSCDKTHTCPPCPAPELLGGPSVFLFPPKPKDTLMISRTPEVTCVVV |
| | DVSHEDPEVKFNWYVDGVEVHNAKTKPREEQYNSTYRVVSVLTVLH |
| | QDWLNGKEYKCKVSNKALPAPIEKTISKAKGQPREPQVYTLPPSREEM |
| | TKNQVSLTCLVKGFYPSDIAVEWESNGQPENNYKTTPPVLDSDGSFFL |
| | YSKLTVDKSRWQQGNVFSCSVMHEALHNHYTQKSLSLSPGK |
| SEQ ID NO: 250 | EPKSSDKTHTCPPCPAPEAAGGPSVFLFPPKPKDTLMISRTPEVTCVVV |
| | DVSHEDPEVKFNWYVDGVEVHNAKTKPREEQYNSTYRVVSVLTVLH |
| | QDWLNGKEYKCKVSNKALGAPIEKTISKAKGQPREPQVYTLPPSREEM |
| | TKNQVSLTCLVKGFYPSDIAVEWESNGQPENNYKTTPPVLDSDGSFFL |
| | YSKLTVDKSRWQQGNVFSCSVMHEALHNHYTQKSLSLSPGK |
| SEQ ID NO: 251 | EPKSSDKTHTCPPCPAPEAAGGPSVFLFPPKPKDTLMISRTPEVTCVVV |
| | DVSHEDPEVKFNWYVDGVEVHNAKTKPREEQYNSTYRVVSVLTVLH |
| | QDWLNGKEYKCKVSNKALGAPIEKTISKAKGQPREPQVYTLPPSREEM |
| | TKNQVSLWCLVKGFYPSDIAVEWESNGQPENNYKTTPPVLDSDGSFFL |
| | YSKLTVDKSRWQQGNVFSCSVMHEALHNHYTQKSLSLSPGK |
| SEQ ID NO: 252 | EPKSSDKTHTCPPCPAPEAAGGPSVFLFPPKPKDTLMISRTPEVTCVVV |
| | DVSHEDPEVKFNWYVDGVEVHNAKTKPREEQYNSTYRVVSVLTVLH |
| | QDWLNGKEYKCKVSNKALGAPIEKTISKAKGQPREPQVYTLPPSREEM |
| | TKNQVSLSCAVKGFYPSDIAVEWESNGQPENNYKTTPPVLDSDGSFFL |
| | VSKLTVDKSRWQQGNVFSCSVMHEALHNHYTQKSLSLSPGK |
| SEQ ID NO: 253 | EPKSSDKTHTCPPCPAPEAAGGPSVFLFPPKPKDTLMISRTPEVTCVVV |
| | DVSHEDPEVKFNWYVDGVEVHNAKTKPREEQYASTYRVVSVLTVLH |
| | QDWLNGKEYKCKVSNKALGAPIEKTISKAKGQPREPQVYTLPPSREEM |
| | TKNQVSLTCLVKGFYPSDIAVEWESNGQPENNYKTTPPVLDSDGSFFL |
| | YSKLTVDKSRWQQGNVFSCSVMHEALHNHYTQKSLSLSPGK |
| SEQ ID NO: 254 | EPKSSDKTHTCPPCPAPEAAGGPSVFLFPPKPKDTLMISRTPEVTCVVV |
| | DVSHEDPEVKFNWYVDGVEVHNAKTKPREEQYASTYRVVSVLTVLH |
| | QDWLNGKEYKCKVSNKALGAPIEKTISKAKGQPREPQVYTLPPSREEM |
| | TKNQVSLWCLVKGFYPSDIAVEWESNGQPENNYKTTPPVLDSDGSFFL |
| | YSKLTVDKSRWQQGNVFSCSVMHEALHNHYTQKSLSLSPGK |
| SEQ ID NO: 255 | EPKSSDKTHTCPPCPAPEAAGGPSVFLFPPKPKDTLMISRTPEVTCVVV |
| | DVSHEDPEVKFNWYVDGVEVHNAKTKPREEQYASTYRVVSVLTVLH |
| | QDWLNGKEYKCKVSNKALGAPIEKTISKAKGQPREPQVYTLPPSREEM |
| | TKNQVSLSCAVKGFYPSDIAVEWESNGQPENNYKTTPPVLDSDGSFFL |
| | VSKLTVDKSRWQQGNVFSCSVMHEALHNHYTQKSLSLSPGK |
| SEQ ID NO: 256 | EPKSCDKTHTCPPCPAPELLGGPSVFLFPPKPKDTLMISRTPEVTCVVV |
| | DVSHEDPEVKFNWYVDGVEVHNAKTKPREEQYASTYRVVSVLTVLH |
| | QDWLNGKEYKCKVSNKALPAPIEKTISKAKGQPREPQVYTLPPSREEM |
| | TKNQVSLTCLVKGFYPSDIAVEWESNGQPENNYKTTPPVLDSDGSFFL |
| | YSKLTVDKSRWQQGNVFSCSVMHEALHNHYTQKSLSLSPGK |
| SEQ ID NO: 257 | EPKSCDKTHTCPPCPAPELLGGPSVFLFPPKPKDTLMISRTPEVTCVVV |
| | DVSHEDPEVKFNWYVDGVEVHNAKTKPREEQYNSTYRVVSVLTVLH |
| | QDWLNGKEYKCKVSNKALPAPIEKTISKAKGQPREPQVYTLPPSREEM |
| | TKNQVSLTCLVKGFYPSDIAVEWESNGQPENNYKTTPPVLDSDGSFFL |
| | YSKLTVDKSRWQQGNVFSCSVMHEALHNHYTQKSLSLSPGK |
| SEQ ID NO: 258 | EPKSSDKTHTCPPCPAPELLGGPSVFLFPPKPKDTLMISRTPEVTCVVVD |
| | VSHEDPEVKFNWYVDGVEVHNAKTKPREEQYASTYRVVSVLTVLHQ |
| | DWLNGKEYKCKVSNKALGAPIEKTISKAKGQPREPQVYTLPPSRDELT |
| | KNQVSLWCLVKGFYPSDIAVEWESNGQPENNYKTTPPVLDSDGSFFLY |
| | SKLTVDKSRWQQGNVFSCSVMHEALHNHYTQKSLSLSPGK |
| SEQ ID NO: 259 | EPKSSDKTHTCPPCPAPELLGGPSVFLFPPKPKDTLMISRTPEVTCVVVD |
| | VSHEDPEVKFNWYVDGVEVHNAKTKPREEQYASTYRVVSVLTVLHQ |
| | DWLNGKEYKCKVSNKALGAPIEKTISKAKGQPREPQVYTLPPSRDELT |
| | KNQVSLSCAVKGFYPSDIAVEWESNGQPENNYKTTPPVLDSDGSFFLV |
| | SKLTVDKSRWQQGNVFSCSVMHEALHNHYTQKSLSLSPGK |

### Modification of Peptides

[0265] A peptide can be modified (e.g., chemically modified) one or more of a variety of ways. In some embodiments, the peptide can be mutated to add function, delete function, or modify the in vivo behavior. One or more loops between the disulfide linkages of a peptide (e.g., a TfR-binding peptide, a target-binding peptide, or a selective depletion complex) can be modified or replaced to include active elements from other peptides (such as described in Moore and Cochran, Methods in Enzymology, 503, p. 223-251, 2012). In some embodiments, the peptides of the present disclosure (e.g., TfR-binding peptides, target-binding peptides, or selective depletion complexes) can be further functionalized and multimerized by adding an additional functional domain. For example, an albumin-binding domain (ABD) from a Finegoldia magna peptostreptococcal albumin-binding protein (SEQ ID NO: 192, MKLNKKLLMAALAGAIVVGGGVNTFAADEPGAIKVDKAPEAPSQELKLTKEEAEKAL KKEKPIAKERLRRLGITSEFILNQIDKATSREGLESLVQTIKQSYLKDHPIKEEKTEETPKY NNLFDKHELGGLGKDKGPGRFDENGWENNEHGYETRENAEKAAVKALGDKEINK SYT ISQGVDGRYYYVL SREEAETPKKPEEKKPEDKRPKMTIDQWLLKNAKEDAIAELKKAGI TSDFYFNAINKAKTVEEVNALKNEILKAHAGKEVNPSTPEVTPSVPQNHYHENDYANIG AGEGTKEDGKKENSKEGIKRKTAREEKPGKEEKPAKEDKKENKKKENTDSPNKKKKE KAALPEAGRRKAEILTLAAASLSSVAGAFISLKKRK). For example, an albumin-binding domain of SEQ ID NO: 193 (LKNAKEDAIAELKKAGITSDFYFNAINKAKTVEEVNALKNEILKA) can be added to a peptide of the present disclosure. In some embodiments, a peptide of the present disclosure can be functionalized with an albumin-binding domain that has been modified for improved albumin affinity, improved stability, reduced immunogenicity, improved manufacturability, or a combination thereof. For example, a peptide can be functionalized with a modified albumin-binding domain of SEQ ID NO: 194 (LKEAKEKAIEELKKAGITSDYYFDLINKAKTVEGVNALKDEILKA) or SEQ ID NO: 227 (LKEAKEKAIEELKKAGITSDYYFDLINKAKAVEGVNALKDEILKA) having high thermostability and improved serum half-life compared to the albumin binding domain of SEQ ID NO: 193. In some embodiments, an albumin-binding peptide may be selected based on a desired off rate for albumin. For example, an albumin-binding peptide of SEQ ID NO: 227 may be selected for its faster off rate relative to SEQ ID NO: 194. The albumin-binding domain comprises a simple three-helical structure that would be unlikely to disturb the independent folding of the other peptide domains (e.g., CDP domains). In some embodiments, a functional domain (e.g., an albumin-binding domain) can increase the serum half-life of a peptide or peptide complex of the present disclosure. A functional domain (e.g., an albumin-binding domain) can be included in any orientation relative to the TfR-binding peptide or the target-binding peptide. For example, a functional domain can be linked to the TfR-binding peptide, the target-binding peptide, or in between the TfR-binding peptide and the target-binding peptide, as illustrated in FIG. 16A-FIG. 16C. In some embodiments, an albumin binding peptide (e.g., SEQ ID NO: 194 or SEQ ID NO: 227) may be used to link a target-binding peptide to a receptor-binding peptide. An additional functional domain can be linked to one or more peptides (e.g., a TfR-binding peptide or a target-binding peptide) via a linker (e.g., any one of SEQ ID NO: 129-SEQ ID NO: 141 or SEQ ID NO: 195-SEQ ID NO: 218).

[0266] A peptide of the present disclosure (e.g., a TfR-binding peptide, a receptor-binding peptide, a target-binding peptide, or a selective depletion complex) may be modified with a signal peptide to mark the peptide for secretion. For example, a peptide may be modified with a signal peptide corresponding to SEQ ID NO: 230 (METDTLLLWVLLLWVPGSTG). In some embodiments, the signal peptide may be appended to an N-terminus or a C-terminus of the peptide. A peptide may be modified for additional stability during translation or secretion. For example, a peptide may be modified with a sidrocalin with a furin cleavage site corresponding to SEQ ID NO: 229 (GSQDSTSDLIPAPPL SKVPLQQNFQDNQFQGKWYVVGLAGNAILREDKDPQKMYATIY ELKEDKSYNVTSVLFRKKKCDYWIRTFVPGSQPGEFTLGNIKSYPGLTSYLVRVVSTNY NQHAMVFFKKVSQNREYFKITLYGRTKELTSELKENFIRFSKSLGLPENHIVFPVPIDQCI DGGGSRRRRKRSGS). In some embodiments, the sidrocalin with the furin cleavage site may be appended to an N-terminus or a C-terminus of the peptide. A peptide may be modified with a signal peptide to mark the peptide for secretion and for additional stability during translation or secretion. For example, a peptide may be modified with a signal peptide and a sidrocalin with a furin cleavage site corresponding to SEQ ID NO: 231 (METDTLLLWVLLLWVPGSTGGSQDSTSDLIPAPPLSKVPLQQNFQDNQFQGKWYVVG LAGNAILREDKDPQKMYATIYELKEDKSYNVTSVLFRKKKCDYWIRTFVPGSQPGEFTL GNIKSYPGLTSYLVRVVSTNYNQHAMVFFKKVSQNREYFKITLYGRTKELTSELKENFI RFSKSLGLPENHIVFPVPIDQCIDGGGSRRRRKRSGS). In some embodiments, the signal peptide and the sidrocalin with the furin cleavage site may be appended to an N-terminus or a C-terminus of the peptide.

[0267] Amino acids of a peptide or a peptide complex (e.g., a TfR-binding peptide, a receptor-binding peptide, a target-binding peptide, or a selective depletion complex) can also be mutated, such as to increase half-life, modify, add or delete binding behavior in vivo, add new targeting function, modify surface charge and hydrophobicity, or allow conjugation sites. N-methylation is one example of methylation that can occur in a peptide of the disclosure. In some embodiments, the peptide is modified by methylation on free amines. For example, full methylation can be accomplished through the use of reductive methylation with formaldehyde and sodium cyanoborohydride.

[0268] The peptides can be modified to add function, such as to graft loops or sequences from other proteins or peptides onto peptides of this disclosure. Likewise, domains, loops, or sequences from this disclosure can be grafted onto other peptides or proteins such as antibodies that have additional function.

[0269] In some embodiments, a selective depletion complex can comprise a tissue targeting domain and can accumulate in the target tissue upon administration to a subject. For example, selective depletion complexes can be conjugated to, linked to, or fused to a molecule (e.g., small molecule, peptide, or protein) with targeting or homing function for a cell of interest or a target protein located on the surface or inside said cell. In some embodiments, selective depletion complexes can be conjugated to, linked to, or fused to a molecule that extends the plasma and/or biological half-life, or modifies the pharmacodynamic (e.g., enhanced binding to a target protein) and/or pharmacokinetic properties (e.g., rate and mode of clearance) of the peptides, or any combination thereof.

[0270] A chemical modification can, for instance, extend the half-life of a peptide or change the biodistribution or pharmacokinetic profile. A chemical modification can comprise a polymer, a polyether, polyethylene glycol, a biopolymer, a polyamino acid, a fatty acid, a dendrimer, an Fc region, a simple saturated carbon chain such as palmitate or myristolate, or albumin. A polyamino acid can include, for example, a poly amino acid sequence with repeated single amino acids (e.g., poly glycine), and a poly amino acid sequence with mixed poly amino acid sequences (e.g., gly-ala-gly-ala; SEQ ID NO: 457) that can or may not follow a pattern, or any combination of the foregoing.

[0271] The peptides of the present disclosure can be modified such that the modification increases the stability and/or the half-life of the peptides. The attachment of a hydrophobic moiety, such as to the N-terminus, the C-terminus, or an internal amino acid, can be used to extend half-life of a peptide of the present disclosure. The peptides can also be modified to increase or decrease the gut permeability or cellular permeability of the peptide. In some cases, the peptides of the present disclosure show high accumulation in glandular cells of the intestine, demonstrating applicability in the treatment and-or prevention of diseases or conditions of the intestines, such as Crohn's disease or more generally inflammatory bowel diseases. The peptide of the present disclosure can include post-translational modifications (e.g., methylation and/or amidation and/or glycosylation), which can affect, e.g., serum half-life. In some embodiments, simple carbon chains (e.g., by myristoylation and/or palmitylation) can be conjugated to, linked to, the fusion proteins or peptides. The simple carbon chains can render the fusion proteins or peptides easily separable from the unconjugated material. For example, methods that can be used to separate the fusion proteins or peptides from the unconjugated material include, but are not limited to, solvent extraction and reverse phase chromatography. Lipophilic moieties can extend half-life through reversible binding to serum albumin. Conjugated moieties can, e.g., be lipophilic moieties that extend half-life of the peptides through reversible binding to serum albumin. In some embodiments, the lipophilic moiety can be cholesterol or a cholesterol derivative including cholestenes, cholestanes, cholestadienes and oxysterols. In some embodiments, the peptides can be conjugated to, linked to, myristic acid (tetradecanoic acid) or a derivative thereof. In other embodiments, the peptides of the present disclosure can be coupled (e.g., conjugated, linked, or fused) to a half-life modifying agent. Examples of half-life modifying agents can include, but is not limited to: a polymer, a polyethylene glycol (PEG), a hydroxyethyl starch, polyvinyl alcohol, a water soluble polymer, a zwitterionic water soluble polymer, a water soluble poly(amino acid), a water soluble polymer of proline, alanine and serine, a water soluble polymer containing glycine, glutamic acid, and serine, an Fc region, a fatty acid, palmitic acid, or a molecule that binds to albumin. In some embodiments, the half-life modifying agent can be a serum albumin binding peptide, for example SA21 (SEQ ID NO: 178, RLIEDICLPRWGCLWEDD). In some embodiments, a SA21 peptide can be conjugated or fused to the CDPs of the present disclosure (e.g., any of SEQ ID NO: 96, SEQ ID NO: 65-SEQ ID NO: 95, SEQ ID NO: 97-SEQ ID NO: 128, SEQ ID NO: 220-SEQ ID NO: 222, or SEQ ID NO: 1-SEQ ID NO: 64). A SA21 fusion peptide can include the SA21 TfR-binding peptide complexes disclosed herein (e.g., SEQ ID NO: 181 or SEQ ID NO: 184). The SA21 peptide can comprise a linker sequence for conjugation to, or fusion between, one or more peptides (e.g., SEQ ID NO: 179, GGGGSGGGGSRLIEDICLPRWGCLWEDDGGGGSGGGGS). Exemplary SA21 peptides, fusion peptides, and linkers are provided in TABLE 5. A control SA21 fusion peptide can comprise a control peptide fused to SA21 (e.g., SEQ ID NO: 180 (GSRLIEDICLPRWGCLWEDDGGGGSGGGGSKCLPPGKPCYGATQKIPCCGVCSHNNCT), SEQ ID NO: 183 (RLIEDICLPRWGCLWEDDGGGGSGGGGSKCLPPGKPCYGATQKIPCCGVCSHNNCT), SEQ ID NO: 182 (GSRLIEDICLPRWGCLWEDDGGGGSGGGGSVRIPVSCKHSGQCLKPCKDAGMRFGKC MNGKCDCTPK), or SEQ ID NO: 185 (RLIEDICLPRWGCLWEDDGGGGSGGGGSVRIPVSCKHSGQCLKPCKDAGMRFGKCMN GKCDCTPK)). Additionally, conjugation of the peptide to a near infrared dye, such as Cy5.5, or to an albumin binder such as Albu-tag can extend serum half-life of any peptide as described herein. In some embodiments, immunogenicity is reduced by using minimal non-human protein sequences to extend serum half-life of the peptide.

TABLE 7
Exemplary TfR-Binding Peptide Complexes Comprising Serum Albumin
Binding Peptides

| SEQ ID NO | Amino Acid Sequence |
|---|---|
| SEQ ID NO: 181 | GSRLIEDICLPRWGCLWEDDGGGGSGGGGSREGCASRCMKYNDELE |
| | KCEARMMSMSNTEEDCEQELEDLLYCLDHCHSQ |
| SEQ ID NO: 184 | RLIEDICLPRWGCLWEDDGGGGSGGGGSREGCASRCMKYNDELEKC |
| | EARMMSMSNTEEDCEQELEDLLYCLDHCHSQ |

[0272] In some embodiments, the first two N-terminal amino acids (GS) of SEQ ID NO: 1-SEQ ID NO: 64 serve as a spacer or linker in order to facilitate conjugation or fusion to another molecule, as well as to facilitate cleavage of the peptide from such conjugated to, linked to, or fused molecules. In some embodiments, the fusion proteins or peptides of the present disclosure can be conjugated to, linked to, or fused to other moieties that, e.g., can modify or effect changes to the properties of the peptides.

[0273] In some embodiments, peptides or peptide complexes of the present disclosure can also be conjugated to, linked to, or fused to other affinity handles. Other affinity handles can include genetic fusion affinity handles. Genetic fusion affinity handles can include 6×His (HHHHHH (SEQ ID NO: 142) or GGGGSHHHHHH (SEQ ID NO: 228); immobilized metal affinity column purification possible), FLAG (DYKDDDDK (SEQ ID NO: 143); anti-FLAG immunoprecipitation), “shorty” FLAG (DYKDE (SEQ ID NO: 144); anti-FLAG immunoprecipitation), hemagglutinin (YPYDVPDYA (SEQ ID NO: 145); anti-HA immunoprecipitation), and streptavidin binding peptide (DVEAWLGAR (SEQ ID NO: 146); streptavidin-mediated precipitation). In some embodiments, peptides or peptide complexes of the present disclosure can also be conjugated to, linked to, or fused to an expression tag or sequence to improve protein expression and/or purification. Such expression tags can include genetic fusion expression tags. Genetic fusion expression tags can include siderocalin (SEQ ID NO: 147,

METDTLLLWVLLLWVPGSTGDYKDEHHHHHHGGSQDSTSDLIPAPPLSK
VPLQQNFQDNQFQGKWYVVGLAGNAILREDKDPQKMYATIYELKEDKSY
NVTSVLFRKKKCDYWIRTFVPGSQPGEFTLGNIKSYPGLTSYLVRVVST
NYNQHAMVFFKKVSQNREYFKITLYGRTKELTSELKENFIRFSKSLGLP
ENHIVFPVPIDQCIDGGGSENLYFQ).

[0274] Additionally, more than one peptide sequence (e.g., a peptide derived from a toxin or knotted venom protein) can be present on, conjugated to, linked to, or fused with a particular peptide. A peptide can be incorporated into a biomolecule by various techniques. A peptide can be incorporated by a chemical transformation, such as the formation of a covalent bond, such as an amide bond. A peptide can be incorporated, for example, by solid phase or solution phase peptide synthesis. A peptide can be incorporated by preparing a nucleic acid sequence encoding the biomolecule, wherein the nucleic acid sequence includes a subsequence that encodes the peptide. The subsequence can be in addition to the sequence that encodes the biomolecule or can substitute for a subsequence of the sequence that encodes the biomolecule.

### Selective Depletion Complexes

[0275] In some embodiments, one or more peptides of the present disclosure can form a selective depletion complex (SDC). A selective depletion complex may comprise a target-binding peptide that binds a target molecule and a receptor-binding peptide that binds a cellular receptor (e.g., a cell surface receptor). In some embodiments, the cell surface receptor is a receptor that is endocytosed (e.g., a transferrin receptor or a programmed death-ligand 1). In some embodiments, the cell surface receptor is a receptor that is recycled back to the cell surface following endocytosis. A receptor-binding peptide of the present disclosure may be a transferrin receptor (TfR)-binding peptide or a programmed death ligand 1 (PD-L1)-binding peptide. For example, a selective depletion complex can comprise a TfR-binding peptide and a target-binding peptide. In some embodiments, the receptor-binding peptide (e.g., the TfR-binding peptide or the PD-L1-binding peptide) and the target-binding peptide can be connected via a linker (e.g., a peptide linker). In some embodiments, the receptor-binding peptide and the target-binding peptide can be directly connected without a linker. In some embodiments, the receptor-binding peptide and the target-binding peptide can be connected via a heterodimerization domain. The receptor-binding peptide can bind the receptor (e.g., TfR or PD-L1) with high affinity at both extracellular pH (such as about pH 7.4) and at endosomal pH (such as about pH 5.5). In some embodiments, the receptor-binding peptide of a selective depletion complex may be a TfR-binding peptide (e.g., any one of SEQ ID NO: 96, SEQ ID NO: 65-SEQ ID NO: 95, SEQ ID NO: 97-SEQ ID NO: 128, SEQ ID NO: 220-SEQ ID NO: 222, or SEQ ID NO: 1-SEQ ID NO: 64). In some embodiments, the receptor-binding peptide of a selective depletion complex may be a PD-L1-binding peptide (e.g., any one of SEQ ID NO: 187, SEQ ID NO: 233-SEQ ID NO: 239, SEQ ID NO: 400-SEQ ID NO: 456, or SEQ ID NO: 141).

[0276] The target-binding peptide can bind a target molecule with an affinity that is pH-dependent. For example, the target-binding molecule can bind to the target molecule with higher affinity at extracellular pH (about pH 7.4) and with lower affinity at a lower endosomal pH (such as about pH 5.5 or about pH 6.5). In some embodiments, the target-binding molecule can release the target molecule upon internalization into an endosomal compartment and acidification of the endosome. Such release of the target molecule upon acidification of the endosome can occur at about pH 7.3, pH 7.2, pH 7.1, pH 7.0, pH 6.9, pH 6.8, pH 6.7, pH 6.6, pH 6.5, pH 6.4, pH 6.3, pH 6.2, pH 6.1, pH 6.0, pH 5.9, pH 5.8, pH 5.7, pH 5.6, pH 5.5, pH 5.4, pH 5.3, pH 5.2, pH 5.1, pH 5.0, pH 4.9, pH 4.8, pH 4.7, pH 4.6, pH 4.5, or lower. In some embodiments, release of the target molecule can occur at a pH of from about pH 7.0 to about pH 4.5, from about pH 6.5 to about pH 5.0, or from about pH 6.0 to about pH 5.5. In some embodiments, the receptor-binding peptide binds a receptor (e.g., a receptor that undergoes recycling) with pH-independent binding (e.g., high affinity at extracellular pH and high affinity at endosomal pH) and the target-binding peptide binds the target with pH-dependent binding (e.g., high affinity at extracellular pH and low affinity at endosomal pH). A selective depletion complex (SDC) comprising a pH-independent receptor-binding peptide and a pH-dependent target-binding peptide may be catalytic (e.g., reused). The SDC may stay bound to the receptor through multiple rounds of endocytosis and has the potential to carry another target molecule in each round and leave the target molecule in the endosome/lysosome for degradation. Thus, one catalytic SDC molecule may cause the degradation of multiple target molecules.

[0277] In some embodiments, the receptor-binding peptide can bind to the receptor with an affinity that is pH dependent. For example, the receptor-binding molecule can bind to the receptor with higher affinity at extracellular pH (such as about pH 7.4) and with lower affinity at a lower endosomal pH (such as about pH 5.5 or about pH 6.5), thereby releasing the selective depletion complex from the receptor upon internalization and acidification of the endosomal compartment. In some embodiment, the receptor-binding peptide can bind the receptor with an affinity that is pH dependent and the target-binding peptide can bind the target with an affinity that is pH dependent or that is pH-independent. A selective depletion molecule can be used to selectively deplete a target molecule (e.g., a soluble protein or a cell surface protein). For example, a selective depletion complex comprising a receptor-binding peptide and a target-binding peptide can bind to the receptor via the receptor-binding peptide and to a target molecule (e.g., a soluble protein or a cell surface protein). The target molecule can be delivered to an endocytic compartment via receptor-mediated endocytosis of the receptor and the selective depletion molecule. In the endocytic compartment, the selective depletion complex can remain bound to the receptor, and the target molecule can be released from the selective depletion complex as the endocytic compartment acidifies. The selective depletion molecule can be recycled to the cell surface along with the receptor, and the target molecule can continue to the lysosome where it is degraded. In some embodiments, the target molecule can remain in the lysosome without being degraded, resulting in enrichment of the target molecule in the lysosome. The selective depletion complexes of the present disclosure can have a low molecular weight compared to target-binding antibodies and can be used to bind and deplete a target without requiring a supply and distribution cold chain.

[0278] In some embodiments, a receptor-binding peptide (a TfR-binding peptide or a PD-L1-binding peptide) may bind to a cellular receptor (e.g., TfR or PD-L1) with an equilibrium dissociation constant (K_{D}) of less than 50 μM, less than 5 μM, less than 500 nM, less than 100 nM, less than 40 nM, less than 30 nM, less than 20 nM, less than 10 nM, less than 5 nM, less than 2 nM, less than 1 nM, less than 0.5 nM, less than 0.4 nM, less than 0.3 nM, less than 0.2 nM, or less than 0.1 nM. In some embodiments, a receptor-binding peptide has an off rate that is slower than the recycling rate of the cellular receptor, such that the receptor-binding peptide is likely to remain bound to receptor during the recycling process. In some embodiments, the receptor-binding peptide may have an off rate that is no faster than 1 minute, no faster than 2 minutes, no faster than 3 minutes, no faster than 4 minutes, no faster than 5 minutes, no faster than 7 minutes, no faster than 10 minutes, no faster than 15 minutes, or no faster than 20 minutes. In some embodiments, the receptor-binding peptide may have an off rate that is from about 1 minute to about 20 minutes, from about 2 minutes to about 15 minutes, from about 2 minutes to about 10 minutes, or from about 5 minutes to about 10 minutes.

[0279] The selective depletion complexes of the present disclosure can be used to treat a disease or a condition by selectively depleting a target molecule that is associated with the disease or the condition. For example, a selective depletion complex can be used to selectively deplete a soluble or cell surface protein that accumulates, contains a disease-associated mutation (e.g., a mutation causing constitutive activity, resistance to treatment, or dominant negative activity), or is over-expressed in a disease state. In some embodiments, the selective depletion complexes of the present disclosure can be used for the treatment and prevention of various neurological diseases including but not limited to epilepsy, schizophrenia, depression, anxiety, bipolar disorder, developmental brain disorders (e.g., autism spectrum), or mood disorder.

[0280] Binding of the herein described selective depletion complexes (e.g., peptide conjugates, fusion peptides, or recombinantly produced peptide complexes) to TfR and subsequent transport across a cell layer or barrier such as the BBB (e.g., via vesicular transcytosis) or a cell membrane (e.g., via endocytosis) can have implications in a number of diseases, conditions, or disorders associated with neurodegeneration. Neurodegenerative diseases that can treated or prevented with the herein described selective depletion complexes can include Alzheimer's disease, Amyotrophic lateral sclerosis, Friedreich's ataxia, Huntington's disease, Lewy body disease, Parkinson's disease, multiple system atrophy (MSA), Spinal muscular atrophy, Motor neuron disease, Lyme disease, Ataxia-telangiectasia, Autosomal dominant cerebellar ataxia, Batten disease, Corticobasal syndrome, Creutzfeldt-Jakob disease, Fragile X-associated tremor/ataxia syndrome, Kufor-Rakeb syndrome, Machado-Joseph disease, multiple sclerosis, chronic traumatic encephalopathy, or frontotemporal dementia. In some embodiments, the TfR-binding peptide can be used in combination with BACE inhibitors, galantamine, amantadine, benztropine, biperiden, bromocriptin, carbidopa, donepezil, entacapone, levodopa, pergolie, pramipexole, procyclidine, rivastigmine, ropinirole, selegiline, tacrine, tolcapone, or trihexyphenidyl to treat and/or prevent a neurodegenerative disease. For example, a selective depletion complex comprising a target-binding peptide that binds a protein associated with neurodegeneration (e.g., tau, amyloid ß (Aß), huntingtin, or α-synuclein) can be used to treat a neurodegenerative disease.

[0281] Binding of the herein described selective depletion complexes (e.g., peptide conjugates, fusion peptides, or recombinantly produced peptide complexes) to TfR and subsequent transport across a cell layer or barrier such as the BBB (e.g., via vesicular transcytosis) or a cell membrane (e.g., via endocytosis) can have implications in various cancers. Cancers that can treated or prevented with the herein described selective depletion complexes can include breast cancer, liver cancer, colon cancer, brain cancer, leukemia, lymphoma, non-Hodgkin lymphoma, myeloma, blood-cell-derived cancer, spleen cancer, lung cancer, pancreatic cancer, prostate cancer, sarcoma, stomach cancer, esophageal cancer, gastrointestinal (GI) cancers, thyroid cancer, endometrial cancer, bladder cancer, cancers of the salivary gland, kidney cancer, muscle cancers, ovarian cancer, glioblastoma, astrocytoma, glioma, medulloblastoma, ependymoma, choroid plexus carcinoma, midline glioma, diffuse intrinsic pontine glioma, lung cancer, bone marrow cell cancers, skin cancer, melanoma, genitourinary cancer, osteosarcoma, muscle-derived sarcoma, melanoma, head and neck cancer, a neuroblastoma, glioblastoma, astrocytoma, glioma, medulloblastoma, ependymoma, choroid plexus carcinoma, midline glioma, and diffuse intrinsic pontine glioma (DIPG), or a CMYC-overexpressing cancer. For example, a selective depletion complex comprising a target-binding peptide that binds a protein associated with cancer (e.g., HER2, EGFR, FGFR-1, PD-L1, VEGF, PD-1, CD38, GD2, SLAMF7, CTLA-4, CCR4, CD20, PDGFRα, VEGFR2, CD33, CD30, CD22, CD79B, Nectin-4, or TROP2) can be used to treat a cancer. In some embodiments, a selective depletion complex for treatment of a cancer can comprise a target-binding peptide that binds an extracellular, soluble, or cell surface protein associated with cell growth, cell division, avoidance of cell death, immune evasion, suppression of inflammatory responses, promotion of vascular growth, or protection from hypoxia. In some embodiments, a selective depletion complex of the present disclosure can be used to deplete anti-inflammatory stimuli (e.g., molecules associated with N2-polarized macrophages or molecules associated with microglia or regulatory T-cells) and promote tumor targeting abilities of abilities of the innate and adaptive immune systems. Selective depletion complexes comprising a target-binding peptide that binds molecules associated with the anti-inflammatory stimuli can augment therapies that otherwise are prone to immune exhaustion (e.g. ionizing radiation or CAR-T cell therapies).

[0282] In some embodiments, the selective depletion complex may be used to reduce immune suppression or suppress pro-inflammatory signaling, such as in immune-mediated diseases. For example, a selective depletion complex may comprise a target-binding peptide that binds a protein associated with immune suppression or pro-inflammatory signaling (e.g., CD47, CD39, CD24, CD25, CD74, TNF-α, IL-1, IL-1R, IL-2, IL-2R, IL-6, IL-6R, IL-10, IL-10R, IL-23, IL-12, PD-1, PD-L1). In some embodiments, a selective depletion complex may be used to treat an inflammatory or neurological condition (e.g., neuroinflammation, neuroinflammatory disease, stroke, traumatic brain injury, Alzheimer's disease, or other tauopathies including neurofibrillary tangle dementia, chronic traumatic encephalopathy (CTE), aging-related tau astrogliopathy, frontotemporal dementia, parkinsonism, progressive supranuclear palsy, corticobasal degeneration, lytico-bodig disease, ganglioglioma, meningioangiomatosis, or subacute sclerosing panencephalitis). For example, a selective depletion complex comprising a TNF-α-binding peptide may be used to treat neuroinflammation, neuroinflammatory disease, stroke, traumatic brain injury, or Alzheimer's disease.

[0283] Binding of the herein described selective depletion complexes (e.g., peptide conjugates, fusion peptides, or recombinantly produced peptide complexes) to TfR and subsequent transport across a cell layer or barrier such as the BBB (e.g., via vesicular transcytosis) or a cell membrane (e.g., via endocytosis) can have implications in a number of diseases, conditions, or disorders associated with harmful inflammation. Harmful inflammation that can be treated or prevented with the herein described selective depletion complexes can include rheumatoid arthritis, psoriasis, multiple sclerosis, lupus, ankylosing spondylitis, antiphospholipid antibody syndrome, gout, inflammatory arthritis center, myositis, scleroderma, Sjogren's disease, vasculitis, inflammatory bowel disease, ulcerative colitis, Crohn's disease, graft-vs-host disease, cytokine storms, cystic fibrosis, inflammation-associated neurodegeneration (e.g., age-associated tauopathy or Alzheimer's Disease), or autoimmune disorders. For example, a selective depletion complex comprising a target-binding peptide that binds a target associated with acute or chronic inflammation (e.g., apolipoprotein E4, TNF-α, IL-1, IL-6, IL-7, IL-12, and IL-23) to selectively deplete inflammatory cytokines or chemokines. In some embodiments, a selective depletion complex may target autoantibodies, for example autoantibodies associated with disease, such as diabetes, thyroid disease, inflammatory disease, systemic lupus erythematosus (SLE or lupus), muscular function, skin disease, organ disease, kidney disease, or rheumatoid arthritis. In some embodiments, a selective depletion complex comprising a target-binding peptide that binds IL-6 can be used to treat inflammation associated with a coronavirus infection (e.g., SARS-CoV-2). Selective depletion complexes that selectively deplete IL-6-elimiating can decrease IL-6 signaling. Apolipoprotein E4 can be associated with Alzheimer's disease.

[0284] Binding of the herein described selective depletion complexes (e.g., peptide conjugates, fusion peptides, or recombinantly produced peptide complexes) to TfR and subsequent transport across a cell layer or barrier such as the BBB (e.g., via vesicular transcytosis) or a cell membrane (e.g., via endocytosis) can have implications in various lysosomal storage diseases. Lysosomal storage diseases that can treated or prevented with the herein described selective depletion complexes can include Gaucher's Disease (deficiency of glucocerebrosidase) or Pompe Disease (deficiency of α-glucosidase). A lysosomal storage enzyme can be administered to the patient such that it is available in the serum or other extracellular fluids. In some embodiments, a selective depletion complex of the present disclosure can be used to selectively recruit lysosomal enzymes to the lysosome, thereby treating a lysosomal storage disease associated with decreased expression of a lysosomal enzyme. The selective depletion complex comprising a target-binding peptide that binds a lysosomal enzyme (e.g., glucocerebrosidase or α-glucosidase) can selectively recruit the lysosomal enzyme into an endocytic compartment via TfR-mediated endocytosis. The selective depletion complex can be recycled to the cell surface, and the lysosomal enzyme target can be delivered to the lysosome, thereby enriching the lysosomal enzyme in the lysosome and treating the lysosomal storage disease.

[0285] In some embodiments, a selective depletion complex (e.g., comprising a target-binding peptide and a cellular receptor-binding peptide) or a selective depletion complex component (e.g., comprising a target-binding peptide or a cellular receptor-binding peptide and a dimerization domain) may comprise a sequence of any one of SEQ ID NO: 288-SEQ ID NO: 313, SEQ ID NO: 315-SEQ ID NO: 348, SEQ ID NO: 351, SEQ ID NO: 352, SEQ ID NO: 355, SEQ ID NO: 356, SEQ ID NO: 358, SEQ ID NO: 359, SEQ ID NO: 360, SEQ ID NO: 361, SEQ ID NO: 362, SEQ ID NO: 363, SEQ ID NO: 364, SEQ ID NO: 365, SEQ ID NO: 371, SEQ ID NO: 373, SEQ ID NO: 376, SEQ ID NO: 378, SEQ ID NO: 382, SEQ ID NO: 384, SEQ ID NO: 387, or SEQ ID NO: 389, or a fragment thereof. In some embodiments, a selective depletion complex (e.g., comprising a target-binding peptide and a cellular receptor-binding peptide) may comprise a sequence that has at least 80%, at least 90%, at least 92%, at least 93%, at least 94%, at least 95%, at least 96%, at least 97%, at least 98%, or at least 99% sequence identity with SEQ ID NO: 96, or at least 80%, at least 90%, at least 92%, at least 93%, at least 94%, at least 95%, at least 96%, at least 97%, at least 98%, or at least 99% sequence identity to any one of SEQ ID NO: 288-SEQ ID NO: 313, SEQ ID NO: 315-SEQ ID NO: 348, SEQ ID NO: 351, SEQ ID NO: 352, SEQ ID NO: 355, SEQ ID NO: 356, SEQ ID NO: 358, SEQ ID NO: 359, SEQ ID NO: 360, SEQ ID NO: 361, SEQ ID NO: 362, SEQ ID NO: 363, SEQ ID NO: 364, SEQ ID NO: 365, SEQ ID NO: 371, SEQ ID NO: 373, SEQ ID NO: 376, SEQ ID NO: 378, SEQ ID NO: 382, SEQ ID NO: 384, SEQ ID NO: 387, or SEQ ID NO: 389, or a fragment thereof. Examples of selective depletion complexes and selection depletion complex components, and their corresponding targets or cellular receptors, are provided in TABLE 8.

TABLE 8
Exemplary Selective Depletion Complexes and Complex Components

| | | SEQ ID | |
|---|---|---|---|
| Target | Receptor | NO | Sequence |
| EGFR | TfR | SEQ ID | REGCASRCMKYNDELEKCEARMMSMSNTEEDCEQE |
| | | NO: 288 | LEDLLYCLDHCHSQGGGGSGGGGSGGGGSQVKLEES |
| | | | GGGSVQTGGSLRLTCAASGHTSRSYGMHWFRQAPG |
| | | | KEREFVSGISWRGDSTGYADSVKGRFTISRDNAKNTV |
| | | | DLQMNSLKPEDTAIYYCAAAAGSHWYGTHYEYDYW |
| | | | GQGTQVTVSS |
| EGFR | TfR | SEQ ID | QVQLQESGGGVVQPGRSLRLSCAASRFTFNNYAMH |
| | | NO: 289 | WVRQAPGKGLEWVAVISYDGSNKYYADSVKGRFTIS |
| | | | RDNSKNTLYLQMNSLRAEDTAVYYCARDLSGYGDY |
| | | | PDYWGQGTLVTVSSGGGGSGGGGSGGGGSSELTQDP |
| | | | AVSVALGQTVRITCQGDSLRSYYASWYQQKPGQAPV |
| | | | LVMYGRNERPSGVPDRFSGSKSGTSASLAISGLQPED |
| | | | EANYYCAGWDDSLTGPVFGGGTKLTVLGGGGGSGG |
| | | | GGSGGGGSQVKLEESGGGSVQTGGSLRLTCAASGHT |
| | | | SRSYGMHWFRQAPGKEREFVSGISWRGDSTGYADSV |
| | | | KGRFTISRDNAKNTVDLQMNSLKPEDTAIYYCAAAA |
| | | | GSHWYGTHYEYDYWGQGTQVTVSS |
| PD-L1 | TfR | SEQ ID | REGCASRCMKYNDELEKCEARMMSMSNTEEDCEQE |
| | | NO: 290 | LEDLLYCLDHCHSQGGGGSGGGGSGGGGSEHDCKV |
| | | | HCVKEWMAGHACAERQKSYTIGRAHCSGQKFDVFK |
| | | | CLDHCAAP |
| PD-L1 | TfR | SEQ ID | QVQLQESGGGVVQPGRSLRLSCAASRFTFNNYAMH |
| | | NO: 291 | WVRQAPGKGLEWVAVISYDGSNKYYADSVKGRFTIS |
| | | | RDNSKNTLYLQMNSLRAEDTAVYYCARDLSGYGDY |
| | | | PDYWGQGTLVTVSSGGGGSGGGGSGGGGSSELTQDP |
| | | | AVSVALGQTVRITCQGDSLRSYYASWYQQKPGQAPV |
| | | | LVMYGRNERPSGVPDRFSGSKSGTSASLAISGLQPED |
| | | | EANYYCAGWDDSLTGPVFGGGTKLTVLGGGGGSGG |
| | | | GGSGGGGSEHDCKVHCVKEWMAGHACAERQKSYTI |
| | | | GRAHCSGQKFDVFKCLDHCAAP |
| | TfR | SEQ ID | REGCASRCMKYNDELEKCEARMMSMSNTEEDCEQE |
| | | NO: 292 | LEDLLYCLDHCHSQGGGGSGGGGSGGGGSEPKSSDK |
| | | | THTCPPCPAPEAAGGPSVFLFPPKPKDTLMISRTPEVT |
| | | | CVVVDVSHEDPEVKFNWYVDGVEVHNAKTKPREEQ |
| | | | YNSTYRVVSVLTVLHQDWLNGKEYKCKVSNKALGA |
| | | | PIEKTISKAKGQPREPQVYTLPPSREEMTKNQVSLWC |
| | | | LVKGFYPSDIAVEWESNGQPENNYKTTPPVLDSDGSF |
| | | | FLYSKLTVDKSRWQQGNVFSCSVMHEALHNHYTQK |
| | | | SLSLSPGK |
| EGFR | TfR | SEQ ID | REGCASRCMKYNDELEKCEARMMSMSNTEEDCEQE |
| | | NO: 293 | LEDLLYCLDHCHSQGGGGSGGGGSGGGGSEPKSSDK |
| | | | THTCPPCPAPEAAGGPSVFLFPPKPKDTLMISRTPEVT |
| | | | CVVVDVSHEDPEVKFNWYVDGVEVHNAKTKPREEQ |
| | | | YNSTYRVVSVLTVLHQDWLNGKEYKCKVSNKALGA |
| | | | PIEKTISKAKGQPREPQVYTLPPSREEMTKNQVSLWC |
| | | | LVKGFYPSDIAVEWESNGQPENNYKTTPPVLDSDGSF |
| | | | FLYSKLTVDKSRWQQGNVFSCSVMHEALHNHYTQK |
| | | | SLSLSPGKGGGGSGGGGSGGGGSQVKLEESGGGSVQ |
| | | | TGGSLRLTCAASGHTSRSYGMHWFRQAPGKEREFVS |
| | | | GISWRGDSTGYADSVKGRFTISRDNAKNTVDLQMNS |
| | | | LKPEDTAIYYCAAAAGSHWYGTHYEYDYWGQGTQV |
| | | | TVSS |
| PD-L1 | TfR | SEQ ID | REGCASRCMKYNDELEKCEARMMSMSNTEEDCEQE |
| | | NO: 294 | LEDLLYCLDHCHSQGGGGSGGGGSGGGGSEPKSSDK |
| | | | THTCPPCPAPEAAGGPSVFLFPPKPKDTLMISRTPEVT |
| | | | CVVVDVSHEDPEVKFNWYVDGVEVHNAKTKPREEQ |
| | | | YNSTYRVVSVLTVLHQDWLNGKEYKCKVSNKALGA |
| | | | PIEKTISKAKGQPREPQVYTLPPSREEMTKNQVSLWC |
| | | | LVKGFYPSDIAVEWESNGQPENNYKTTPPVLDSDGSF |
| | | | FLYSKLTVDKSRWQQGNVFSCSVMHEALHNHYTQK |
| | | | SLSLSPGKGGGGSGGGGSGGGGSEHDCKVHCVKEW |
| | | | MAGHACAERQKSYTIGRAHCSGQKFDVFKCLDHCA |
| | | | AP |
| | TfR | SEQ ID | QVQLQESGGGVVQPGRSLRLSCAASRFTENNYAMH |
| | | NO: 295 | WVRQAPGKGLEWVAVISYDGSNKYYADSVKGRFTIS |
| | | | RDNSKNTLYLQMNSLRAEDTAVYYCARDLSGYGDY |
| | | | PDYWGQGTLVTVSSGGGGSGGGGSGGGGSSELTQDP |
| | | | AVSVALGQTVRITCQGDSLRSYYASWYQQKPGQAPV |
| | | | LVMYGRNERPSGVPDRFSGSKSGTSASLAISGLQPED |
| | | | EANYYCAGWDDSLTGPVFGGGTKLTVLGGGGGSEP |
| | | | KSSDKTHTCPPCPAPEAAGGPSVFLFPPKPKDTLMISR |
| | | | TPEVTCVVVDVSHEDPEVKFNWYVDGVEVHNAKTK |
| | | | PREEQYNSTYRVVSVLTVLHQDWLNGKEYKCKVSN |
| | | | KALGAPIEKTISKAKGQPREPQVYTLPPSREEMTKNQ |
| | | | VSLWCLVKGFYPSDIAVEWESNGQPENNYKTTPPVL |
| | | | DSDGSFFLYSKLTVDKSRWQQGNVFSCSVMHEALHN |
| | | | HYTQKSLSLSPGK |
| EGFR | TfR | SEQ ID | QVQLQESGGGVVQPGRSLRLSCAASRFTFNNYAMH |
| | | NO: 296 | WVRQAPGKGLEWVAVISYDGSNKYYADSVKGRFTIS |
| | | | RDNSKNTLYLQMNSLRAEDTAVYYCARDLSGYGDY |
| | | | PDYWGQGTLVTVSSGGGGSGGGGSGGGGSSELTQDP |
| | | | AVSVALGQTVRITCQGDSLRSYYASWYQQKPGQAPV |
| | | | LVMYGRNERPSGVPDRFSGSKSGTSASLAISGLQPED |
| | | | EANYYCAGWDDSLTGPVFGGGTKLTVLGGGGGSEP |
| | | | KSSDKTHTCPPCPAPEAAGGPSVFLFPPKPKDTLMISR |
| | | | TPEVTCVVVDVSHEDPEVKFNWYVDGVEVHNAKTK |
| | | | PREEQYNSTYRVVSVLTVLHQDWLNGKEYKCKVSN |
| | | | KALGAPIEKTISKAKGQPREPQVYTLPPSREEMTKNQ |
| | | | VSLWCLVKGFYPSDIAVEWESNGQPENNYKTTPPVL |
| | | | DSDGSFFLYSKLTVDKSRWQQGNVFSCSVMHEALHN |
| | | | HYTQKSLSLSPGKGGGGSGGGGSGGGGSQVKLEESG |
| | | | GGSVQTGGSLRLTCAASGHTSRSYGMHWFRQAPGK |
| | | | EREFVSGISWRGDSTGYADSVKGRFTISRDNAKNTVD |
| | | | LQMNSLKPEDTAIYYCAAAAGSHWYGTHYEYDYWG |
| | | | QGTQVTVSS |
| PD-L1 | TfR | SEQ ID | QVQLQESGGGVVQPGRSLRLSCAASRFTFNNYAMH |
| | | NO: 297 | WVRQAPGKGLEWVAVISYDGSNKYYADSVKGRFTIS |
| | | | RDNSKNTLYLQMNSLRAEDTAVYYCARDLSGYGDY |
| | | | PDYWGQGTLVTVSSGGGGSGGGGSGGGGSSELTQDP |
| | | | AVSVALGQTVRITCQGDSLRSYYASWYQQKPGQAPV |
| | | | LVMYGRNERPSGVPDRFSGSKSGTSASLAISGLQPED |
| | | | EANYYCAGWDDSLTGPVFGGGTKLTVLGGGGGSEP |
| | | | KSSDKTHTCPPCPAPEAAGGPSVFLFPPKPKDTLMISR |
| | | | TPEVTCVVVDVSHEDPEVKFNWYVDGVEVHNAKTK |
| | | | PREEQYNSTYRVVSVLTVLHQDWLNGKEYKCKVSN |
| | | | KALGAPIEKTISKAKGQPREPQVYTLPPSREEMTKNQ |
| | | | VSLWCLVKGFYPSDIAVEWESNGQPENNYKTTPPVL |
| | | | DSDGSFFLYSKLTVDKSRWQQGNVFSCSVMHEALHN |
| | | | HYTQKSLSLSPGKGGGGSGGGGSGGGGSEHDCKVHC |
| | | | VKEWMAGHACAERQKSYTIGRAHCSGQKFDVFKCL |
| | | | DHCAAP |
| | TfR | SEQ ID | QVQLQESGGGVVQPGRSLRLSCAASRYPFHHHDHH |
| | | NO: 298 | WVRQAPGKGLEWVAVISYDGSNKYYADSVKGRFTIS |
| | | | RDNSKNTLYLQMNSLRAEDTAVYYCARDLSGYGDY |
| | | | PDYWGQGTLVTVSSGGGGSGGGGSGGGGSSELTQDP |
| | | | AVSVALGQTVRITCQGDSLRSYYASWYQQKPGQAPV |
| | | | LVMYGRNERPSGVPDRFSGSKSGTSASLAISGLQPED |
| | | | EANYYCAGWDDSLTGPVFGGGTKLTVLGGGGGSEP |
| | | | KSSDKTHTCPPCPAPEAAGGPSVFLFPPKPKDTLMISR |
| | | | TPEVTCVVVDVSHEDPEVKFNWYVDGVEVHNAKTK |
| | | | PREEQYNSTYRVVSVLTVLHQDWLNGKEYKCKVSN |
| | | | KALGAPIEKTISKAKGQPREPQVYTLPPSREEMTKNQ |
| | | | VSLWCLVKGFYPSDIAVEWESNGQPENNYKTTPPVL |
| | | | DSDGSFFLYSKLTVDKSRWQQGNVFSCSVMHEALHN |
| | | | HYTQKSLSLSPGK |
| EGFR | TfR | SEQ ID | QVQLQESGGGVVQPGRSLRLSCAASRYPFHHHDHH |
| | | NO: 299 | WVRQAPGKGLEWVAVISYDGSNKYYADSVKGRFTIS |
| | | | RDNSKNTLYLQMNSLRAEDTAVYYCARDLSGYGDY |
| | | | PDYWGQGTLVTVSSGGGGSGGGGSGGGGSSELTQDP |
| | | | AVSVALGQTVRITCQGDSLRSYYASWYQQKPGQAPV |
| | | | LVMYGRNERPSGVPDRFSGSKSGTSASLAISGLQPED |
| | | | EANYYCAGWDDSLTGPVFGGGTKLTVLGGGGGSEP |
| | | | KSSDKTHTCPPCPAPEAAGGPSVFLFPPKPKDTLMISR |
| | | | TPEVTCVVVDVSHEDPEVKFNWYVDGVEVHNAKTK |
| | | | PREEQYNSTYRVVSVLTVLHQDWLNGKEYKCKVSN |
| | | | KALGAPIEKTISKAKGQPREPQVYTLPPSREEMTKNQ |
| | | | VSLWCLVKGFYPSDIAVEWESNGQPENNYKTTPPVL |
| | | | DSDGSFFLYSKLTVDKSRWQQGNVFSCSVMHEALHN |
| | | | HYTQKSLSLSPGKGGGGSGGGGSGGGGSQVKLEESG |
| | | | GGSVQTGGSLRLTCAASGHTSRSYGMGWFRQAPGK |
| | | | EREFVSGISWRGDSTGYADSVKGRFTISRDNAKNTVD |
| | | | LQMNSLKPEDTAIYYCAAAAGSAWYHTLYEYDYWG |
| | | | QGTQVTVSS |
| PD-L1 | TfR | SEQ ID | QVQLQESGGGVVQPGRSLRLSCAASRYPFHHHDHH |
| | | NO: 300 | WVRQAPGKGLEWVAVISYDGSNKYYADSVKGRFTIS |
| | | | RDNSKNTLYLQMNSLRAEDTAVYYCARDLSGYGDY |
| | | | PDYWGQGTLVTVSSGGGGSGGGGSGGGGSSELTQDP |
| | | | AVSVALGQTVRITCQGDSLRSYYASWYQQKPGQAPV |
| | | | LVMYGRNERPSGVPDRFSGSKSGTSASLAISGLQPED |
| | | | EANYYCAGWDDSLTGPVFGGGTKLTVLGGGGGSEP |
| | | | KSSDKTHTCPPCPAPEAAGGPSVFLFPPKPKDTLMISR |
| | | | TPEVTCVVVDVSHEDPEVKFNWYVDGVEVHNAKTK |
| | | | PREEQYNSTYRVVSVLTVLHQDWLNGKEYKCKVSN |
| | | | KALGAPIEKTISKAKGQPREPQVYTLPPSREEMTKNQ |
| | | | VSLWCLVKGFYPSDIAVEWESNGQPENNYKTTPPVL |
| | | | DSDGSFFLYSKLTVDKSRWQQGNVFSCSVMHEALHN |
| | | | HYTQKSLSLSPGKGGGGSGGGGSGGGGSEEDCKVHC |
| | | | VKEWMAGKACAERQKSYTIGRAHCSGQKFDVFKCL |
| | | | DHCAAP |
| EGFR | | SEQ ID | EPKSSDKTHTCPPCPAPEAAGGPSVFLFPPKPKDTLMI |
| | | NO: 301 | SRTPEVTCVVVDVSHEDPEVKFNWYVDGVEVHNAK |
| | | | TKPREEQYNSTYRVVSVLTVLHQDWLNGKEYKCKV |
| | | | SNKALGAPIEKTISKAKGQPREPQVYTLPPSREEMTK |
| | | | NQVSLSCAVKGFYPSDIAVEWESNGQPENNYKTTPP |
| | | | VLDSDGSFFLVSKLTVDKSRWQQGNVFSCSVMHEAL |
| | | | HNHYTQKSLSLSPGKGGGGSGGGGSGGGGSQVKLEE |
| | | | SGGGSVQTGGSLRLTCAASGHTSRSYGMGWFRQAPG |
| | | | KEREFVSGISWRGDSTGYADSVKGRFTISRDNAKNTV |
| | | | DLQMNSLKPEDTAIYYCAAAAGSAWYHTLYEYDYW |
| | | | GQGTQVTVSS |
| EGFR | | SEQ ID | EPKSSDKTHTCPPCPAPEAAGGPSVFLFPPKPKDTLMI |
| | | NO: 302 | SRTPEVTCVVVDVSHEDPEVKFNWYVDGVEVHNAK |
| | | | TKPREEQYNSTYRVVSVLTVLHQDWLNGKEYKCKV |
| | | | SNKALGAPIEKTISKAKGQPREPQVYTLPPSREEMTK |
| | | | NQVSLSCAVKGFYPSDIAVEWESNGQPENNYKTTPP |
| | | | VLDSDGSFFLVSKLTVDKSRWQQGNVFSCSVMHEAL |
| | | | HNHYTQKSLSLSPGKGGGGSGGGGSGGGGSQVKLEE |
| | | | SGGGSVQTGGSLRLTCAASGHTSRSYGMHWFRQAPG |
| | | | KEREFVSGISWRGDSTGYADSVKGRFTISRDNAKNTV |
| | | | DLQMNSLKPEDTAIYYCAAAAGSHWYGTHYEYDYW |
| | | | GQGTQVTVSS |
| PD-L1 | | SEQ ID | EPKSSDKTHTCPPCPAPEAAGGPSVFLFPPKPKDTLMI |
| | | NO: 303 | SRTPEVTCVVVDVSHEDPEVKFNWYVDGVEVHNAK |
| | | | TKPREEQYNSTYRVVSVLTVLHQDWLNGKEYKCKV |
| | | | SNKALGAPIEKTISKAKGQPREPQVYTLPPSREEMTK |
| | | | NQVSLSCAVKGFYPSDIAVEWESNGQPENNYKTTPP |
| | | | VLDSDGSFFLVSKLTVDKSRWQQGNVFSCSVMHEAL |
| | | | HNHYTQKSLSLSPGKGGGGSGGGGSGGGGSEEDCKV |
| | | | HCVKEWMAGKACAERQKSYTIGRAHCSGQKFDVFK |
| | | | CLDHCAAP |
| PD-L1 | | SEQ ID | EPKSSDKTHTCPPCPAPEAAGGPSVFLFPPKPKDTLMI |
| | | NO: 304 | SRTPEVTCVVVDVSHEDPEVKFNWYVDGVEVHNAK |
| | | | TKPREEQYNSTYRVVSVLTVLHQDWLNGKEYKCKV |
| | | | SNKALGAPIEKTISKAKGQPREPQVYTLPPSREEMTK |
| | | | NQVSLSCAVKGFYPSDIAVEWESNGQPENNYKTTPP |
| | | | VLDSDGSFFLVSKLTVDKSRWQQGNVFSCSVMHEAL |
| | | | HNHYTQKSLSLSPGKGGGGSGGGGSGGGGSEHDCK |
| | | | VHCVKEWMAGHACAERQKSYTIGRAHCSGQKFDVF |
| | | | KCLDHCAAP |
| EGFR | TfR | SEQ ID | REGCASRCMKYNDELEKCEARMMSMSNTEEDCEQE |
| | | NO: 305 | LEDLLYCLDHCHSQGGGGSGGGGSGGGGSEPKSSDK |
| | | | THTCPPCPAPEAAGGPSVFLFPPKPKDTLMISRTPEVT |
| | | | CVVVDVSHEDPEVKFNWYVDGVEVHNAKTKPREEQ |
| | | | YNSTYRVVSVLTVLHQDWLNGKEYKCKVSNKALGA |
| | | | PIEKTISKAKGQPREPQVYTLPPSREEMTKNQVSLSCA |
| | | | VKGFYPSDIAVEWESNGQPENNYKTTPPVLDSDGSFF |
| | | | LVSKLTVDKSRWQQGNVFSCSVMHEALHNHYTQKS |
| | | | LSLSPGKGGGGSGGGGSGGGGSQVKLEESGGGSVQT |
| | | | GGSLRLTCAASGHTSRSYGMHWFRQAPGKEREFVSG |
| | | | ISWRGDSTGYADSVKGRFTISRDNAKNTVDLQMNSL |
| | | | KPEDTAIYYCAAAAGSHWYGTHYEYDYWGQGTQVT |
| | | | VSS |
| PD-L1 | TfR | SEQ ID | REGCASRCMKYNDELEKCEARMMSMSNTEEDCEQE |
| | | NO: 306 | LEDLLYCLDHCHSQGGGGSGGGGSGGGGSEPKSSDK |
| | | | THTCPPCPAPEAAGGPSVFLFPPKPKDTLMISRTPEVT |
| | | | CVVVDVSHEDPEVKFNWYVDGVEVHNAKTKPREEQ |
| | | | YNSTYRVVSVLTVLHQDWLNGKEYKCKVSNKALGA |
| | | | PIEKTISKAKGQPREPQVYTLPPSREEMTKNQVSLSCA |
| | | | VKGFYPSDIAVEWESNGQPENNYKTTPPVLDSDGSFF |
| | | | LVSKLTVDKSRWQQGNVFSCSVMHEALHNHYTQKS |
| | | | LSLSPGKGGGGSGGGGSGGGGSEHDCKVHCVKEWM |
| | | | AGHACAERQKSYTIGRAHCSGQKFDVFKCLDHCAAP |
| EGFR | TfR | SEQ ID | REGCASRCMKYNDELEKCEARMMSMSNTEEDCEQE |
| | | NO: 307 | LEDLLYCLDHCHSQGGGGSGGGGSGGGGSEPKSSDK |
| | | | THTCPPCPAPEAAGGPSVFLFPPKPKDTLMISRTPEVT |
| | | | CVVVDVSHEDPEVKFNWYVDGVEVHNAKTKPREEQ |
| | | | YNSTYRVVSVLTVLHQDWLNGKEYKCKVSNKALGA |
| | | | PIEKTISKAKGQPREPQVYTLPPSREEMTKNQVSLTCL |
| | | | VKGFYPSDIAVEWESNGQPENNYKTTPPVLDSDGSFF |
| | | | LYSKLTVDKSRWQQGNVFSCSVMHEALHNHYTQKS |
| | | | LSLSPGKGGGGSGGGGSGGGGSQVKLEESGGGSVQT |
| | | | GGSLRLTCAASGHTSRSYGMHWFRQAPGKEREFVSG |
| | | | ISWRGDSTGYADSVKGRFTISRDNAKNTVDLQMNSL |
| | | | KPEDTAIYYCAAAAGSHWYGTHYEYDYWGQGTQVT |
| | | | VSS |
| PD-L1 | TfR | SEQ ID | REGCASRCMKYNDELEKCEARMMSMSNTEEDCEQE |
| | | NO: 308 | LEDLLYCLDHCHSQGGGGSGGGGSGGGGSEPKSSDK |
| | | | THTCPPCPAPEAAGGPSVFLFPPKPKDTLMISRTPEVT |
| | | | CVVVDVSHEDPEVKFNWYVDGVEVHNAKTKPREEQ |
| | | | YNSTYRVVSVLTVLHQDWLNGKEYKCKVSNKALGA |
| | | | PIEKTISKAKGQPREPQVYTLPPSREEMTKNQVSLTCL |
| | | | VKGFYPSDIAVEWESNGQPENNYKTTPPVLDSDGSFF |
| | | | LYSKLTVDKSRWQQGNVFSCSVMHEALHNHYTQKS |
| | | | LSLSPGKGGGGSGGGGSGGGGSEHDCKVHCVKEWM |
| | | | AGHACAERQKSYTIGRAHCSGQKFDVFKCLDHCAAP |
| EGFR | | SEQ ID | QVKLEESGGGSVQTGGSLRLTCAASGHTSRSYGMH |
| | | NO: 309 | WFRQAPGKEREFVSGISWRGDSTGYADSVKGRFTISR |
| | | | DNAKNTVDLQMNSLKPEDTAIYYCAAAAGSHWYGT |
| | | | HYEYDYWGQGTQVTVSSGGGGSGGGGSGGGGSEPK |
| | | | SSDKTHTCPPCPAPEAAGGPSVFLFPPKPKDTLMISRT |
| | | | PEVTCVVVDVSHEDPEVKFNWYVDGVEVHNAKTKP |
| | | | REEQYNSTYRVVSVLTVLHQDWLNGKEYKCKVSNK |
| | | | ALGAPIEKTISKAKGQPREPQVYTLPPSREEMTKNQV |
| | | | SLWCLVKGFYPSDIAVEWESNGQPENNYKTTPPVLD |
| | | | SDGSFFLYSKLTVDKSRWQQGNVFSCSVMHEALHNH |
| | | | YTQKSLSLSPGK |
| EGFR | TfR | SEQ ID | QVKLEESGGGSVQTGGSLRLTCAASGHTSRSYGMH |
| | | NO: 310 | WFRQAPGKEREFVSGISWRGDSTGYADSVKGRFTISR |
| | | | DNAKNTVDLQMNSLKPEDTAIYYCAAAAGSHWYGT |
| | | | HYEYDYWGQGTQVTVSSGGGGSGGGGSGGGGSEPK |
| | | | SSDKTHTCPPCPAPEAAGGPSVFLFPPKPKDTLMISRT |
| | | | PEVTCVVVDVSHEDPEVKFNWYVDGVEVHNAKTKP |
| | | | REEQYNSTYRVVSVLTVLHQDWLNGKEYKCKVSNK |
| | | | ALGAPIEKTISKAKGQPREPQVYTLPPSREEMTKNQV |
| | | | SLWCLVKGFYPSDIAVEWESNGQPENNYKTTPPVLD |
| | | | SDGSFFLYSKLTVDKSRWQQGNVFSCSVMHEALHNH |
| | | | YTQKSLSLSPGKGGGGSGGGGSGGGGSREGCASRCM |
| | | | KYNDELEKCEARMMSMSNTEEDCEQELEDLLYCLD |
| | | | HCHSQ |
| | TfR | SEQ ID | EPKSSDKTHTCPPCPAPEAAGGPSVFLFPPKPKDTLMI |
| | | NO: 311 | SRTPEVTCVVVDVSHEDPEVKFNWYVDGVEVHNAK |
| | | | TKPREEQYNSTYRVVSVLTVLHQDWLNGKEYKCKV |
| | | | SNKALGAPIEKTISKAKGQPREPQVYTLPPSREEMTK |
| | | | NQVSLSCAVKGFYPSDIAVEWESNGQPENNYKTTPP |
| | | | VLDSDGSFFLVSKLTVDKSRWQQGNVFSCSVMHEAL |
| | | | HNHYTQKSLSLSPGKGGGGSGGGGSGGGGSREGCAS |
| | | | RCMKYNDELEKCEARMMSMSNTEEDCEQELEDLLY |
| | | | CLDHCHSQ |
| EGFR | TfR | SEQ ID | QVKLEESGGGSVQTGGSLRLTCAASGHTSRSYGMH |
| | | NO: 312 | WFRQAPGKEREFVSGISWRGDSTGYADSVKGRFTISR |
| | | | DNAKNTVDLQMNSLKPEDTAIYYCAAAAGSHWYGT |
| | | | HYEYDYWGQGTQVTVSSGGGGSGGGGSGGGGSEPK |
| | | | SSDKTHTCPPCPAPEAAGGPSVFLFPPKPKDTLMISRT |
| | | | PEVTCVVVDVSHEDPEVKFNWYVDGVEVHNAKTKP |
| | | | REEQYNSTYRVVSVLTVLHQDWLNGKEYKCKVSNK |
| | | | ALGAPIEKTISKAKGQPREPQVYTLPPSREEMTKNQV |
| | | | SLSCAVKGFYPSDIAVEWESNGQPENNYKTTPPVLDS |
| | | | DGSFFLVSKLTVDKSRWQQGNVFSCSVMHEALHNH |
| | | | YTQKSLSLSPGKGGGGSGGGGSGGGGSREGCASRCM |
| | | | KYNDELEKCEARMMSMSNTEEDCEQELEDLLYCLD |
| | | | HCHSQ |
| EGFR | TfR | SEQ ID | QVKLEESGGGSVQTGGSLRLTCAASGHTSRSYGMH |
| | | NO: 313 | WFRQAPGKEREFVSGISWRGDSTGYADSVKGRFTISR |
| | | | DNAKNTVDLQMNSLKPEDTAIYYCAAAAGSHWYGT |
| | | | HYEYDYWGQGTQVTVSSGGGGSGGGGSGGGGSEPK |
| | | | SSDKTHTCPPCPAPEAAGGPSVFLFPPKPKDTLMISRT |
| | | | PEVTCVVVDVSHEDPEVKFNWYVDGVEVHNAKTKP |
| | | | REEQYNSTYRVVSVLTVLHQDWLNGKEYKCKVSNK |
| | | | ALGAPIEKTISKAKGQPREPQVYTLPPSREEMTKNQV |
| | | | SLTCLVKGFYPSDIAVEWESNGQPENNYKTTPPVLDS |
| | | | DGSFFLYSKLTVDKSRWQQGNVFSCSVMHEALHNH |
| | | | YTQKSLSLSPGKGGGGSGGGGSGGGGSREGCASRCM |
| | | | KYNDELEKCEARMMSMSNTEEDCEQELEDLLYCLD |
| | | | HCHSQ |
| | TfR | SEQ ID | REGCASRCMKYNDELEKCEARMMSMSNTEEDCEQE |
| | | NO: 315 | LEDLLYCLDHCHSQGTGGGGSGGGGSGGGGSGGGG |
| | | | SEPKSCDKTHTCPPCPAPEAAGGPSVFLFPPKPKDTL |
| | | | MISRTPEVTCVVVDVSHEDPEVKFNWYVDGVEVHN |
| | | | AKTKPREEQYNSTYRVVSVLTVLHQDWLNGKEYKC |
| | | | KVSNKALGAPIEKTISKAKGQPREPQVYTLPPSRDELT |
| | | | KNQVSLWCLVKGFYPSDIAVEWESNGQPENNYKTTP |
| | | | PVLDSDGSFFLYSKLTVDKSRWQQGNVFSCSVMHEA |
| | | | LHNHYTQKSLSLSPGK |
| | TfR | SEQ ID | REGCASRCMKYNDELEKCEARMMSMSNTEEDCEQE |
| | | NO: 316 | LEDLLYCLDHCHSQGTGSPVPSTPPTPSPSTPPTPSPSA |
| | | | SEPKSCDKTHTCPPCPAPEAAGGPSVFLFPPKPKDTL |
| | | | MISRTPEVTCVVVDVSHEDPEVKFNWYVDGVEVHN |
| | | | AKTKPREEQYNSTYRVVSVLTVLHQDWLNGKEYKC |
| | | | KVSNKALGAPIEKTISKAKGQPREPQVYTLPPSRDELT |
| | | | KNQVSLWCLVKGFYPSDIAVEWESNGQPENNYKTTP |
| | | | PVLDSDGSFFLYSKLTVDKSRWQQGNVFSCSVMHEA |
| | | | LHNHYTQKSLSLSPGK |
| PD-L1 | TfR | SEQ ID | EHDCKVHCVKEWMAGHACAERQKSYTIGRAHCSGQ |
| | | NO: 317 | KFDVFKCLDHCAAPGTGGGGSGGGGSGGGGSGGGG |
| | | | SLKEAKEKAIEELKKAGITSDYYFDLINKAKTVEGVN |
| | | | ALKDEILKAGGGGSGGGGSGGGGSGGGGSREGCASR |
| | | | CMKYNDELEKCEARMMSMSNTEEDCEQELEDLLYC |
| | | | LDHCHSQ |
| PD-L1 | TfR | SEQ ID | EHDCKVHCVKEWMAGHACAERQKSYTIGRAHCSGQ |
| | | NO: 318 | KFDVFKCLDHCAAPGTGGGGSGGGGSGGGGSGGGG |
| | | | SLKEAKEKAIEELKKAGITSDYYFDLINKAKAVEGVN |
| | | | ALKDEILKAGGGGSGGGGSGGGGSGGGGSREGCASR |
| | | | CMKYNDELEKCEARMMSMSNTEEDCEQELEDLLYC |
| | | | LDHCHSQ |
| PD-L1 | | SEQ ID | EHDCKVHCVKEWMAGHACAERQKSYTIGRAHCSGQ |
| | | NO: 319 | KFDVFKCLDHCAAPGTGGGGSGGGGSGGGGSGGGG |
| | | | SEPKSCDKTHTCPPCPAPEAAGGPSVFLFPPKPKDTL |
| | | | MISRTPEVTCVVVDVSHEDPEVKFNWYVDGVEVHN |
| | | | AKTKPREEQYNSTYRVVSVLTVLHQDWLNGKEYKC |
| | | | KVSNKALGAPIEKTISKAKGQPREPQVYTLPPSRDELT |
| | | | KNQVSLSCAVKGFYPSDIAVEWESNGQPENNYKTTP |
| | | | PVLDSDGSFFLVSKLTVDKSRWQQGNVFSCSVMHEA |
| | | | LHNHYTQKSLSLSPGK |
| PD-L1 | TfR | SEQ ID | EHDCKVHCVKEWMAGHACAERQKSYTIGRAHCSGQ |
| | | NO: 320 | KFDVFKCLDHCAAPGTGGGGSGGGGSGGGGSGGGG |
| | | | SEPKSCDKTHTCPPCPAPEAAGGPSVFLFPPKPKDTL |
| | | | MISRTPEVTCVVVDVSHEDPEVKFNWYVDGVEVHN |
| | | | AKTKPREEQYNSTYRVVSVLTVLHQDWLNGKEYKC |
| | | | KVSNKALGAPIEKTISKAKGQPREPQVYTLPPSRDELT |
| | | | KNQVSLSCAVKGFYPSDIAVEWESNGQPENNYKTTP |
| | | | PVLDSDGSFFLVSKLTVDKSRWQQGNVFSCSVMHEA |
| | | | LHNHYTQKSLSLSPGKGGGGSGGGGSGGGGSREGCA |
| | | | SRCMKYNDELEKCEARMMSMSNTEEDCEQELEDLL |
| | | | YCLDHCHSQ |
| PD-L1 | | SEQ ID | EHDCKVHCVKEWMAGHACAERQKSYTIGRAHCSGQ |
| | | NO: 321 | KFDVFKCLDHCAAPGTGGGGSGGGGSGGGGSGGGG |
| | | | SEPKSCDKTHTCPPCPAPEAAGGPSVFLFPPKPKDTL |
| | | | MISRTPEVTCVVVDVSHEDPEVKFNWYVDGVEVHN |
| | | | AKTKPREEQYNSTYRVVSVLTVLHQDWLNGKEYKC |
| | | | KVSNKALGAPIEKTISKAKGQPREPQVYTLPPSRDELT |
| | | | KNQVSLWCLVKGFYPSDIAVEWESNGQPENNYKTTP |
| | | | PVLDSDGSFFLYSKLTVDKSRWQQGNVFSCSVMHEA |
| | | | LHNHYTQKSLSLSPGK |
| PD-L1 | TfR | SEQ ID | EHDCKVHCVKEWMAGHACAERQKSYTIGRAHCSGQ |
| | | NO: 322 | KFDVFKCLDHCAAPGTGSPVPSTPPTPSPSTPPTPSPSA |
| | | | SLKEAKEKAIEELKKAGITSDYYFDLINKAKTVEGVN |
| | | | ALKDEILKAGSPVPSTPPTPSPSTPPTPSPSASREGCAS |
| | | | RCMKYNDELEKCEARMMSMSNTEEDCEQELEDLLY |
| | | | CLDHCHSQ |
| PD-L1 | TfR | SEQ ID | EHDCKVHCVKEWMAGHACAERQKSYTIGRAHCSGQ |
| | | NO: 323 | KFDVFKCLDHCAAPGTGSPVPSTPPTPSPSTPPTPSPSA |
| | | | SLKEAKEKAIEELKKAGITSDYYFDLINKAKAVEGVN |
| | | | ALKDEILKAGSPVPSTPPTPSPSTPPTPSPSASREGCAS |
| | | | RCMKYNDELEKCEARMMSMSNTEEDCEQELEDLLY |
| | | | CLDHCHSQ |
| PD-L1 | | SEQ ID | EHDCKVHCVKEWMAGHACAERQKSYTIGRAHCSGQ |
| | | NO: 324 | KFDVFKCLDHCAAPGTGSPVPSTPPTPSPSTPPTPSPSA |
| | | | SEPKSCDKTHTCPPCPAPEAAGGPSVFLFPPKPKDTL |
| | | | MISRTPEVTCVVVDVSHEDPEVKFNWYVDGVEVHN |
| | | | AKTKPREEQYNSTYRVVSVLTVLHQDWLNGKEYKC |
| | | | KVSNKALGAPIEKTISKAKGQPREPQVYTLPPSRDELT |
| | | | KNQVSLSCAVKGFYPSDIAVEWESNGQPENNYKTTP |
| | | | PVLDSDGSFFLVSKLTVDKSRWQQGNVFSCSVMHEA |
| | | | LHNHYTQKSLSLSPGK |
| PD-L1 | TfR | SEQ ID | EHDCKVHCVKEWMAGHACAERQKSYTIGRAHCSGQ |
| | | NO: 325 | KFDVFKCLDHCAAPGTGSPVPSTPPTPSPSTPPTPSPSA |
| | | | SEPKSCDKTHTCPPCPAPEAAGGPSVFLFPPKPKDTL |
| | | | MISRTPEVTCVVVDVSHEDPEVKFNWYVDGVEVHN |
| | | | AKTKPREEQYNSTYRVVSVLTVLHQDWLNGKEYKC |
| | | | KVSNKALGAPIEKTISKAKGQPREPQVYTLPPSRDELT |
| | | | KNQVSLSCAVKGFYPSDIAVEWESNGQPENNYKTTP |
| | | | PVLDSDGSFFLVSKLTVDKSRWQQGNVFSCSVMHEA |
| | | | LHNHYTQKSLSLSPGKGGGGSGGGGSGGGGSREGCA |
| | | | SRCMKYNDELEKCEARMMSMSNTEEDCEQELEDLL |
| | | | YCLDHCHSQ |
| PD-L1 | | SEQ ID | EHDCKVHCVKEWMAGHACAERQKSYTIGRAHCSGQ |
| | | NO: 326 | KFDVFKCLDHCAAPGTGSPVPSTPPTPSPSTPPTPSPSA |
| | | | SEPKSCDKTHTCPPCPAPEAAGGPSVFLFPPKPKDTL |
| | | | MISRTPEVTCVVVDVSHEDPEVKFNWYVDGVEVHN |
| | | | AKTKPREEQYNSTYRVVSVLTVLHQDWLNGKEYKC |
| | | | KVSNKALGAPIEKTISKAKGQPREPQVYTLPPSRDELT |
| | | | KNQVSLWCLVKGFYPSDIAVEWESNGQPENNYKTTP |
| | | | PVLDSDGSFFLYSKLTVDKSRWQQGNVFSCSVMHEA |
| | | | LHNHYTQKSLSLSPGK |
| EGFR | TfR | SEQ ID | NSDSECPLSHDGYCLHGGVCMYIKAVDRYACNCVV |
| | | NO: 327 | GYIGERCQYRDLTWWGPRGTGGGGSGGGGSGGGGS |
| | | | GGGGSLKEAKEKAIEELKKAGITSDYYFDLINKAKTV |
| | | | EGVNALKDEILKAGGGGSGGGGSGGGGSGGGGSRE |
| | | | GCASRCMKYNDELEKCEARMMSMSNTEEDCEQELE |
| | | | DLLYCLDHCHSQ |
| EGFR | TfR | SEQ ID | NSDSECPLSHDGYCLHGGVCMYIKAVDRYACNCVV |
| | | NO: 328 | GYIGERCQYRDLTWWGPRGTGGGGSGGGGSGGGGS |
| | | | GGGGSLKEAKEKAIEELKKAGITSDYYFDLINKAKAV |
| | | | EGVNALKDEILKAGGGGSGGGGSGGGGSGGGGSRE |
| | | | GCASRCMKYNDELEKCEARMMSMSNTEEDCEQELE |
| | | | DLLYCLDHCHSQ |
| EGFR | | SEQ ID | NSDSECPLSHDGYCLHGGVCMYIKAVDRYACNCVV |
| | | NO: 329 | GYIGERCQYRDLTWWGPRGTGGGGSGGGGSGGGGS |
| | | | GGGGSEPKSCDKTHTCPPCPAPEAAGGPSVFLFPPKP |
| | | | KDTLMISRTPEVTCVVVDVSHEDPEVKFNWYVDGVE |
| | | | VHNAKTKPREEQYNSTYRVVSVLTVLHQDWLNGKE |
| | | | YKCKVSNKALGAPIEKTISKAKGQPREPQVYTLPPSR |
| | | | DELTKNQVSLSCAVKGFYPSDIAVEWESNGQPENNY |
| | | | KTTPPVLDSDGSFFLVSKLTVDKSRWQQGNVFSCSV |
| | | | MHEALHNHYTQKSLSLSPGK |
| EGFR | TfR | SEQ ID | NSDSECPLSHDGYCLHGGVCMYIKAVDRYACNCVV |
| | | NO: 330 | GYIGERCQYRDLTWWGPRGTGGGGSGGGGSGGGGS |
| | | | GGGGSEPKSCDKTHTCPPCPAPEAAGGPSVFLFPPKP |
| | | | KDTLMISRTPEVTCVVVDVSHEDPEVKFNWYVDGVE |
| | | | VHNAKTKPREEQYNSTYRVVSVLTVLHQDWLNGKE |
| | | | YKCKVSNKALGAPIEKTISKAKGQPREPQVYTLPPSR |
| | | | DELTKNQVSLSCAVKGFYPSDIAVEWESNGQPENNY |
| | | | KTTPPVLDSDGSFFLVSKLTVDKSRWQQGNVFSCSV |
| | | | MHEALHNHYTQKSLSLSPGKGGGGSGGGGSGGGGS |
| | | | REGCASRCMKYNDELEKCEARMMSMSNTEEDCEQE |
| | | | LEDLLYCLDHCHSQ |
| EGFR | | SEQ ID | NSDSECPLSHDGYCLHGGVCMYIKAVDRYACNCVV |
| | | NO: 331 | GYIGERCQYRDLTWWGPRGTGGGGSGGGGSGGGGS |
| | | | GGGGSEPKSCDKTHTCPPCPAPEAAGGPSVFLFPPKP |
| | | | KDTLMISRTPEVTCVVVDVSHEDPEVKFNWYVDGVE |
| | | | VHNAKTKPREEQYNSTYRVVSVLTVLHQDWLNGKE |
| | | | YKCKVSNKALGAPIEKTISKAKGQPREPQVYTLPPSR |
| | | | DELTKNQVSLWCLVKGFYPSDIAVEWESNGQPENNY |
| | | | KTTPPVLDSDGSFFLYSKLTVDKSRWQQGNVFSCSV |
| | | | MHEALHNHYTQKSLSLSPGK |
| EGFR | TfR | SEQ ID | NSDSECPLSHDGYCLHGGVCMYIKAVDRYACNCVV |
| | | NO: 332 | GYIGERCQYRDLTWWGPRGTGSPVPSTPPTPSPSTPPT |
| | | | PSPSASLKEAKEKAIEELKKAGITSDYYFDLINKAKTV |
| | | | EGVNALKDEILKAGSPVPSTPPTPSPSTPPTPSPSASRE |
| | | | GCASRCMKYNDELEKCEARMMSMSNTEEDCEQELE |
| | | | DLLYCLDHCHSQ |
| EGFR | TfR | SEQ ID | NSDSECPLSHDGYCLHGGVCMYIKAVDRYACNCVV |
| | | NO: 333 | GYIGERCQYRDLTWWGPRGTGSPVPSTPPTPSPSTPPT |
| | | | PSPSASLKEAKEKAIEELKKAGITSDYYFDLINKAKAV |
| | | | EGVNALKDEILKAGSPVPSTPPTPSPSTPPTPSPSASRE |
| | | | GCASRCMKYNDELEKCEARMMSMSNTEEDCEQELE |
| | | | DLLYCLDHCHSQ |
| EGFR | | SEQ ID | NSDSECPLSHDGYCLHGGVCMYIKAVDRYACNCVV |
| | | NO: 334 | GYIGERCQYRDLTWWGPRGTGSPVPSTPPTPSPSTPPT |
| | | | PSPSASEPKSCDKTHTCPPCPAPEAAGGPSVFLFPPKP |
| | | | KDTLMISRTPEVTCVVVDVSHEDPEVKFNWYVDGVE |
| | | | VHNAKTKPREEQYNSTYRVVSVLTVLHQDWLNGKE |
| | | | YKCKVSNKALGAPIEKTISKAKGQPREPQVYTLPPSR |
| | | | DELTKNQVSLSCAVKGFYPSDIAVEWESNGQPENNY |
| | | | KTTPPVLDSDGSFFLVSKLTVDKSRWQQGNVFSCSV |
| | | | MHEALHNHYTQKSLSLSPGK |
| EGFR | TfR | SEQ ID | NSDSECPLSHDGYCLHGGVCMYIKAVDRYACNCVV |
| | | NO: 335 | GYIGERCQYRDLTWWGPRGTGSPVPSTPPTPSPSTPPT |
| | | | PSPSASEPKSCDKTHTCPPCPAPEAAGGPSVFLFPPKP |
| | | | KDTLMISRTPEVTCVVVDVSHEDPEVKFNWYVDGVE |
| | | | VHNAKTKPREEQYNSTYRVVSVLTVLHQDWLNGKE |
| | | | YKCKVSNKALGAPIEKTISKAKGQPREPQVYTLPPSR |
| | | | DELTKNQVSLSCAVKGFYPSDIAVEWESNGQPENNY |
| | | | KTTPPVLDSDGSFFLVSKLTVDKSRWQQGNVFSCSV |
| | | | MHEALHNHYTQKSLSLSPGKGGGGSGGGGSGGGGS |
| | | | REGCASRCMKYNDELEKCEARMMSMSNTEEDCEQE |
| | | | LEDLLYCLDHCHSQ |
| EGFR | | SEQ ID | NSDSECPLSHDGYCLHGGVCMYIKAVDRYACNCVV |
| | | NO: 336 | GYIGERCQYRDLTWWGPRGTGSPVPSTPPTPSPSTPPT |
| | | | PSPSASEPKSCDKTHTCPPCPAPEAAGGPSVFLFPPKP |
| | | | KDTLMISRTPEVTCVVVDVSHEDPEVKFNWYVDGVE |
| | | | VHNAKTKPREEQYNSTYRVVSVLTVLHQDWLNGKE |
| | | | YKCKVSNKALGAPIEKTISKAKGQPREPQVYTLPPSR |
| | | | DELTKNQVSLWCLVKGFYPSDIAVEWESNGQPENNY |
| | | | KTTPPVLDSDGSFFLYSKLTVDKSRWQQGNVFSCSV |
| | | | MHEALHNHYTQKSLSLSPGK |
| EGFR | TfR | SEQ ID | QVKLEESGGGSVQTGGSLRLTCAASGHTSRSYGMH |
| | | NO: 337 | WFRQAPGKEREFVSGISWRGDSTGYADSVKGRFTISR |
| | | | DNAKNTVDLQMNSLKPEDTAIYYCAAAAGSHWYGT |
| | | | HYEYDYWGQGTQVTVSSGTGGGGSGGGGSGGGGSG |
| | | | GGGSLKEAKEKAIEELKKAGITSDYYFDLINKAKTVE |
| | | | GVNALKDEILKAGGGGSGGGGSGGGGSGGGGSREG |
| | | | CASRCMKYNDELEKCEARMMSMSNTEEDCEQELED |
| | | | LLYCLDHCHSQ |
| EGFR | TfR | SEQ ID | QVKLEESGGGSVQTGGSLRLTCAASGHTSRSYGMH |
| | | NO: 338 | WFRQAPGKEREFVSGISWRGDSTGYADSVKGRFTISR |
| | | | DNAKNTVDLQMNSLKPEDTAIYYCAAAAGSHWYGT |
| | | | HYEYDYWGQGTQVTVSSGTGGGGSGGGGSGGGGSG |
| | | | GGGSLKEAKEKAIEELKKAGITSDYYFDLINKAKAVE |
| | | | GVNALKDEILKAGGGGSGGGGSGGGGSGGGGSREG |
| | | | CASRCMKYNDELEKCEARMMSMSNTEEDCEQELED |
| | | | LLYCLDHCHSQ |
| EGFR | | SEQ ID | QVKLEESGGGSVQTGGSLRLTCAASGHTSRSYGMH |
| | | NO: 339 | WFRQAPGKEREFVSGISWRGDSTGYADSVKGRFTISR |
| | | | DNAKNTVDLQMNSLKPEDTAIYYCAAAAGSHWYGT |
| | | | HYEYDYWGQGTQVTVSSGTGGGGSGGGGSGGGGSG |
| | | | GGGSEPKSCDKTHTCPPCPAPEAAGGPSVFLFPPKPK |
| | | | DTLMISRTPEVTCVVVDVSHEDPEVKFNWYVDGVEV |
| | | | HNAKTKPREEQYNSTYRVVSVLTVLHQDWLNGKEY |
| | | | KCKVSNKALGAPIEKTISKAKGQPREPQVYTLPPSRD |
| | | | ELTKNQVSLSCAVKGFYPSDIAVEWESNGQPENNYK |
| | | | TTPPVLDSDGSFFLVSKLTVDKSRWQQGNVFSCSVM |
| | | | HEALHNHYTQKSLSLSPGK |
| EGFR | TfR | SEQ ID | QVKLEESGGGSVQTGGSLRLTCAASGHTSRSYGMH |
| | | NO: 340 | WFRQAPGKEREFVSGISWRGDSTGYADSVKGRFTISR |
| | | | DNAKNTVDLQMNSLKPEDTAIYYCAAAAGSHWYGT |
| | | | HYEYDYWGQGTQVTVSSGTGGGGSGGGGSGGGGSG |
| | | | GGGSEPKSCDKTHTCPPCPAPEAAGGPSVFLFPPKPK |
| | | | DTLMISRTPEVTCVVVDVSHEDPEVKFNWYVDGVEV |
| | | | HNAKTKPREEQYNSTYRVVSVLTVLHQDWLNGKEY |
| | | | KCKVSNKALGAPIEKTISKAKGQPREPQVYTLPPSRD |
| | | | ELTKNQVSLSCAVKGFYPSDIAVEWESNGQPENNYK |
| | | | TTPPVLDSDGSFFLVSKLTVDKSRWQQGNVFSCSVM |
| | | | HEALHNHYTQKSLSLSPGKGGGGSGGGGSGGGGSRE |
| | | | GCASRCMKYNDELEKCEARMMSMSNTEEDCEQELE |
| | | | DLLYCLDHCHSQ |
| EGFR | | SEQ ID | QVKLEESGGGSVQTGGSLRLTCAASGHTSRSYGMH |
| | | NO: 341 | WFRQAPGKEREFVSGISWRGDSTGYADSVKGRFTISR |
| | | | DNAKNTVDLQMNSLKPEDTAIYYCAAAAGSHWYGT |
| | | | HYEYDYWGQGTQVTVSSGTGGGGSGGGGSGGGGSG |
| | | | GGGSEPKSCDKTHTCPPCPAPEAAGGPSVFLFPPKPK |
| | | | DTLMISRTPEVTCVVVDVSHEDPEVKFNWYVDGVEV |
| | | | HNAKTKPREEQYNSTYRVVSVLTVLHQDWLNGKEY |
| | | | KCKVSNKALGAPIEKTISKAKGQPREPQVYTLPPSRD |
| | | | ELTKNQVSLWCLVKGFYPSDIAVEWESNGQPENNYK |
| | | | TTPPVLDSDGSFFLYSKLTVDKSRWQQGNVFSCSVM |
| | | | HEALHNHYTQKSLSLSPGK |
| EGFR | TfR | SEQ ID | QVKLEESGGGSVQTGGSLRLTCAASGHTSRSYGMH |
| | | NO: 342 | WFRQAPGKEREFVSGISWRGDSTGYADSVKGRFTISR |
| | | | DNAKNTVDLQMNSLKPEDTAIYYCAAAAGSHWYGT |
| | | | HYEYDYWGQGTQVTVSSGTGSPVPSTPPTPSPSTPPTP |
| | | | SPSASLKEAKEKAIEELKKAGITSDYYFDLINKAKTVE |
| | | | GVNALKDEILKAGSPVPSTPPTPSPSTPPTPSPSASREG |
| | | | CASRCMKYNDELEKCEARMMSMSNTEEDCEQELED |
| | | | LLYCLDHCHSQ |
| EGFR | TfR | SEQ ID | QVKLEESGGGSVQTGGSLRLTCAASGHTSRSYGMH |
| | | NO: 343 | WFRQAPGKEREFVSGISWRGDSTGYADSVKGRFTISR |
| | | | DNAKNTVDLQMNSLKPEDTAIYYCAAAAGSHWYGT |
| | | | HYEYDYWGQGTQVTVSSGTGSPVPSTPPTPSPSTPPTP |
| | | | SPSASLKEAKEKAIEELKKAGITSDYYFDLINKAKAVE |
| | | | GVNALKDEILKAGSPVPSTPPTPSPSTPPTPSPSASREG |
| | | | CASRCMKYNDELEKCEARMMSMSNTEEDCEQELED |
| | | | LLYCLDHCHSQ |
| EGFR | | SEQ ID | QVKLEESGGGSVQTGGSLRLTCAASGHTSRSYGMH |
| | | NO: 344 | WFRQAPGKEREFVSGISWRGDSTGYADSVKGRFTISR |
| | | | DNAKNTVDLQMNSLKPEDTAIYYCAAAAGSHWYGT |
| | | | HYEYDYWGQGTQVTVSSGTGSPVPSTPPTPSPSTPPTP |
| | | | SPSASEPKSCDKTHTCPPCPAPEAAGGPSVFLFPPKPK |
| | | | DTLMISRTPEVTCVVVDVSHEDPEVKFNWYVDGVEV |
| | | | HNAKTKPREEQYNSTYRVVSVLTVLHQDWLNGKEY |
| | | | KCKVSNKALGAPIEKTISKAKGQPREPQVYTLPPSRD |
| | | | ELTKNQVSLSCAVKGFYPSDIAVEWESNGQPENNYK |
| | | | TTPPVLDSDGSFFLVSKLTVDKSRWQQGNVFSCSVM |
| | | | HEALHNHYTQKSLSLSPGK |
| EGFR | TfR | SEQ ID | QVKLEESGGGSVQTGGSLRLTCAASGHTSRSYGMH |
| | | NO: 345 | WFRQAPGKEREFVSGISWRGDSTGYADSVKGRFTISR |
| | | | DNAKNTVDLQMNSLKPEDTAIYYCAAAAGSHWYGT |
| | | | HYEYDYWGQGTQVTVSSGTGSPVPSTPPTPSPSTPPTP |
| | | | SPSASEPKSCDKTHTCPPCPAPEAAGGPSVFLFPPKPK |
| | | | DTLMISRTPEVTCVVVDVSHEDPEVKFNWYVDGVEV |
| | | | HNAKTKPREEQYNSTYRVVSVLTVLHQDWLNGKEY |
| | | | KCKVSNKALGAPIEKTISKAKGQPREPQVYTLPPSRD |
| | | | ELTKNQVSLSCAVKGFYPSDIAVEWESNGQPENNYK |
| | | | TTPPVLDSDGSFFLVSKLTVDKSRWQQGNVFSCSVM |
| | | | HEALHNHYTQKSLSLSPGKGGGGSGGGGSGGGGSRE |
| | | | GCASRCMKYNDELEKCEARMMSMSNTEEDCEQELE |
| | | | DLLYCLDHCHSQ |
| EGFR | | SEQ ID | QVKLEESGGGSVQTGGSLRLTCAASGHTSRSYGMH |
| | | NO: 346 | WFRQAPGKEREFVSGISWRGDSTGYADSVKGRFTISR |
| | | | DNAKNTVDLQMNSLKPEDTAIYYCAAAAGSHWYGT |
| | | | HYEYDYWGQGTQVTVSSGTGSPVPSTPPTPSPSTPPTP |
| | | | SPSASEPKSCDKTHTCPPCPAPEAAGGPSVFLFPPKPK |
| | | | DTLMISRTPEVTCVVVDVSHEDPEVKFNWYVDGVEV |
| | | | HNAKTKPREEQYNSTYRVVSVLTVLHQDWLNGKEY |
| | | | KCKVSNKALGAPIEKTISKAKGQPREPQVYTLPPSRD |
| | | | ELTKNQVSLWCLVKGFYPSDIAVEWESNGQPENNYK |
| | | | TTPPVLDSDGSFFLYSKLTVDKSRWQQGNVFSCSVM |
| | | | HEALHNHYTQKSLSLSPGK |
| EGFR | TfR | SEQ ID | QVQLQESGGGVVQPGRSLRLSCAASRYPFHHHDHH |
| | | NO: 347 | WVRQAPGKGLEWVAVISYDGSNKYYADSVKGRFTIS |
| | | | RDNSKNTLYLQMNSLRAEDTAVYYCARDLSGYGDY |
| | | | PDYWGQGTLVTVSSGGGGSGGGGSGGGGSSELTQDP |
| | | | AVSVALGQTVRITCQGDSLRSYYASWYQQKPGQAPV |
| | | | LVMYGRNERPSGVPDRFSGSKSGTSASLAISGLQPED |
| | | | EANYYCAGWDDSLTGPVFGGGTKLTVLGGGGGSGG |
| | | | GGSGGGGSQVKLEESGGGSVQTGGSLRLTCAASGHT |
| | | | SRSYGMGWFRQAPGKEREFVSGISWRGDSTGYADSV |
| | | | KGRFTISRDNAKNTVDLQMNSLKPEDTAIYYCAAAA |
| | | | GSAWYHTLYEYDYWGQGTQVTVSS |
| PD-L1 | TfR | SEQ ID | QVQLQESGGGVVQPGRSLRLSCAASRYPFHHHDHH |
| | | NO: 348 | WVRQAPGKGLEWVAVISYDGSNKYYADSVKGRFTIS |
| | | | RDNSKNTLYLQMNSLRAEDTAVYYCARDLSGYGDY |
| | | | PDYWGQGTLVTVSSGGGGSGGGGSGGGGSSELTQDP |
| | | | AVSVALGQTVRITCQGDSLRSYYASWYQQKPGQAPV |
| | | | LVMYGRNERPSGVPDRFSGSKSGTSASLAISGLQPED |
| | | | EANYYCAGWDDSLTGPVFGGGTKLTVLGGGGGSGG |
| | | | GGSGGGGSEEDCKVHCVKEWMAGKACAERQKSYTI |
| | | | GRAHCSGQKFDVFKCLDHCAAP |
| PD-L1 | TfR | SEQ ID | REGCASRCMKYNDELEKCEARMMSMSNTEEDCEQE |
| | | NO: 351 | LEDLLYCLDHCHSQGGGGSGGGGSGGGGSEEDCKV |
| | | | HCVKEWMAGKACAERQKSYTIGRAHCSGQKFDVFK |
| | | | CLDHCAAP |
| EGFR | PD-L1 | SEQ ID | QVQLQESGGGVVQPGRSLRLSCAASRFTFNNYAMH |
| | | NO: 352 | WVRQAPGKGLEWVAVISYDGSNKYYADSVKGRFTIS |
| | | | RDNSKNTLYLQMNSLRAEDTAVYYCARDLSGYGDY |
| | | | PDYWGQGTLVTVSSGGGGSGGGGSGGGGSSELTQDP |
| | | | AVSVALGQTVRITCQGDSLRSYYASWYQQKPGQAPV |
| | | | LVMYGRNERPSGVPDRFSGSKSGTSASLAISGLQPED |
| | | | EANYYCAGWDDSLTGPVFGGGTKLTVLGGGGGSGG |
| | | | GGSGGGGSEEDCKVHCVKEWMAGKACAERQKSYTI |
| | | | GRAHCSGQKFDVFKCLDHCAAP |
| PD-L1 | TfR | SEQ ID | EEDCKVHCVKEWMAGKACAERQKSYTIGRAHCSGQ |
| | | NO: 355 | KFDVFKCLDHCAAPGTGGGGSGGGGSGGGGSGGGG |
| | | | SLKEAKEKAIEELKKAGITSDYYFDLINKAKTVEGVN |
| | | | ALKDEILKAGGGGSGGGGSGGGGSGGGGSREGCASR |
| | | | CMKYNDELEKCEARMMSMSNTEEDCEQELEDLLYC |
| | | | LDHCHSQ |
| PD-L1 | TfR | SEQ ID | EEDCKVHCVKEWMAGKACAERQKSYTIGRAHCSGQ |
| | | NO: 356 | KFDVFKCLDHCAAPGTGGGGSGGGGSGGGGSGGGG |
| | | | SLKEAKEKAIEELKKAGITSDYYFDLINKAKAVEGVN |
| | | | ALKDEILKAGGGGSGGGGSGGGGSGGGGSREGCASR |
| | | | CMKYNDELEKCEARMMSMSNTEEDCEQELEDLLYC |
| | | | LDHCHSQ |
| PD-L1 | | SEQ ID | EEDCKVHCVKEWMAGKACAERQKSYTIGRAHCSGQ |
| | | NO: 358 | KFDVFKCLDHCAAPGTGGGGSGGGGSGGGGSGGGG |
| | | | SEPKSCDKTHTCPPCPAPEAAGGPSVFLFPPKPKDTL |
| | | | MISRTPEVTCVVVDVSHEDPEVKFNWYVDGVEVHN |
| | | | AKTKPREEQYNSTYRVVSVLTVLHQDWLNGKEYKC |
| | | | KVSNKALGAPIEKTISKAKGQPREPQVYTLPPSRDELT |
| | | | KNQVSLSCAVKGFYPSDIAVEWESNGQPENNYKTTP |
| | | | PVLDSDGSFFLVSKLTVDKSRWQQGNVFSCSVMHEA |
| | | | LHNHYTQKSLSLSPGK |
| PD-L1 | TfR | SEQ ID | EEDCKVHCVKEWMAGKACAERQKSYTIGRAHCSGQ |
| | | NO: 359 | KFDVFKCLDHCAAPGTGGGGSGGGGSGGGGSGGGG |
| | | | SEPKSCDKTHTCPPCPAPEAAGGPSVFLFPPKPKDTL |
| | | | MISRTPEVTCVVVDVSHEDPEVKFNWYVDGVEVHN |
| | | | AKTKPREEQYNSTYRVVSVLTVLHQDWLNGKEYKC |
| | | | KVSNKALGAPIEKTISKAKGQPREPQVYTLPPSRDELT |
| | | | KNQVSLSCAVKGFYPSDIAVEWESNGQPENNYKTTP |
| | | | PVLDSDGSFFLVSKLTVDKSRWQQGNVFSCSVMHEA |
| | | | LHNHYTQKSLSLSPGKGGGGGGGGSGGGGSREGCA |
| | | | SRCMKYNDELEKCEARMMSMSNTEEDCEQELEDLL |
| | | | YCLDHCHSQ |
| PD-L1 | | SEQ ID | EEDCKVHCVKEWMAGKACAERQKSYTIGRAHCSGQ |
| | | NO: 360 | KFDVFKCLDHCAAPGTGGGGSGGGGSGGGGSGGGG |
| | | | SEPKSCDKTHTCPPCPAPEAAGGPSVFLFPPKPKDTL |
| | | | MISRTPEVTCVVVDVSHEDPEVKFNWYVDGVEVHN |
| | | | AKTKPREEQYNSTYRVVSVLTVLHQDWLNGKEYKC |
| | | | KVSNKALGAPIEKTISKAKGQPREPQVYTLPPSRDELT |
| | | | KNQVSLWCLVKGFYPSDIAVEWESNGQPENNYKTTP |
| | | | PVLDSDGSFFLYSKLTVDKSRWQQGNVFSCSVMHEA |
| | | | LHNHYTQKSLSLSPGK |
| PD-L1 | TfR | SEQ ID | EEDCKVHCVKEWMAGKACAERQKSYTIGRAHCSGQ |
| | | NO: 361 | KFDVFKCLDHCAAPGTGSPVPSTPPTPSPSTPPTPSPSA |
| | | | SLKEAKEKAIEELKKAGITSDYYFDLINKAKTVEGVN |
| | | | ALKDEILKAGSPVPSTPPTPSPSTPPTPSPSASREGCAS |
| | | | RCMKYNDELEKCEARMMSMSNTEEDCEQELEDLLY |
| | | | CLDHCHSQ |
| PD-L1 | TfR | SEQ ID | EEDCKVHCVKEWMAGKACAERQKSYTIGRAHCSGQ |
| | | NO: 362 | KFDVFKCLDHCAAPGTGSPVPSTPPTPSPSTPPTPSPSA |
| | | | SLKEAKEKAIEELKKAGITSDYYFDLINKAKAVEGVN |
| | | | ALKDEILKAGSPVPSTPPTPSPSTPPTPSPSASREGCAS |
| | | | RCMKYNDELEKCEARMMSMSNTEEDCEQELEDLLY |
| | | | CLDHCHSQ |
| PD-L1 | | SEQ ID | EEDCKVHCVKEWMAGKACAERQKSYTIGRAHCSGQ |
| | | NO: 363 | KFDVFKCLDHCAAPGTGSPVPSTPPTPSPSTPPTPSPSA |
| | | | SEPKSCDKTHTCPPCPAPEAAGGPSVFLFPPKPKDTL |
| | | | MISRTPEVTCVVVDVSHEDPEVKFNWYVDGVEVHN |
| | | | AKTKPREEQYNSTYRVVSVLTVLHQDWLNGKEYKC |
| | | | KVSNKALGAPIEKTISKAKGQPREPQVYTLPPSRDELT |
| | | | KNQVSLSCAVKGFYPSDIAVEWESNGQPENNYKTTP |
| | | | PVLDSDGSFFLVSKLTVDKSRWQQGNVFSCSVMHEA |
| | | | LHNHYTQKSLSLSPGK |
| PD-L1 | TfR | SEQ ID | EEDCKVHCVKEWMAGKACAERQKSYTIGRAHCSGQ |
| | | NO: 364 | KFDVFKCLDHCAAPGTGSPVPSTPPTPSPSTPPTPSPSA |
| | | | SEPKSCDKTHTCPPCPAPEAAGGPSVFLFPPKPKDTL |
| | | | MISRTPEVTCVVVDVSHEDPEVKFNWYVDGVEVHN |
| | | | AKTKPREEQYNSTYRVVSVLTVLHQDWLNGKEYKC |
| | | | KVSNKALGAPIEKTISKAKGQPREPQVYTLPPSRDELT |
| | | | KNQVSLSCAVKGFYPSDIAVEWESNGQPENNYKTTP |
| | | | PVLDSDGSFFLVSKLTVDKSRWQQGNVFSCSVMHEA |
| | | | LHNHYTQKSLSLSPGKGGGGSGGGGSGGGGSREGCA |
| | | | SRCMKYNDELEKCEARMMSMSNTEEDCEQELEDLL |
| | | | YCLDHCHSQ |
| PD-L1 | | SEQ ID | EEDCKVHCVKEWMAGKACAERQKSYTIGRAHCSGQ |
| | | NO: 365 | KFDVFKCLDHCAAPGTGSPVPSTPPTPSPSTPPTPSPSA |
| | | | SEPKSCDKTHTCPPCPAPEAAGGPSVFLFPPKPKDTL |
| | | | MISRTPEVTCVVVDVSHEDPEVKFNWYVDGVEVHN |
| | | | AKTKPREEQYNSTYRVVSVLTVLHQDWLNGKEYKC |
| | | | KVSNKALGAPIEKTISKAKGQPREPQVYTLPPSRDELT |
| | | | KNQVSLWCLVKGFYPSDIAVEWESNGQPENNYKTTP |
| | | | PVLDSDGSFFLYSKLTVDKSRWQQGNVFSCSVMHEA |
| | | | LHNHYTQKSLSLSPGK |
| EGFR | | SEQ ID | QVKLEESGGGSVQTGGSLRLTCAASGRTSRSYGMGW |
| | | NO: 371 | FRQAPGKEREFVSGISWRGDSTGYADSVKGRFTISRD |
| | | | NAKNTVDLQMNSLKPEDTAIYYCAAAAGSAWYGTL |
| | | | YEYDYWGQGTQVTVSSGTGGGGSGGGGSGGGGSGG |
| | | | GGSEPKSCDKTHTCPPCPAPEAAGGPSVFLFPPKPKDT |
| | | | LMISRTPEVTCVVVDVSHEDPEVKFNWYVDGVEVHN |
| | | | AKTKPREEQYNSTYRVVSVLTVLHQDWLNGKEYKC |
| | | | KVSNKALGAPIEKTISKAKGQPREPQVYTLPPSRDELT |
| | | | KNQVSLSCAVKGFYPSDIAVEWESNGQPENNYKTTP |
| | | | PVLDSDGSFFLVSKLTVDKSRWQQGNVFSCSVMHEA |
| | | | LHNHYTQKSLSLSPGK |
| EGFR | | SEQ ID | QVKLEESGGGSVQTGGSLRLTCAASGRTSRSYGMGW |
| | | NO: 373 | FRQAPGKEREFVSGISWRGDSTGYADSVKGRFTISRD |
| | | | NAKNTVDLQMNSLKPEDTAIYYCAAAAGSAWYGTL |
| | | | YEYDYWGQGTQVTVSSGTGGGGSGGGGSGGGGSGG |
| | | | GGSEPKSCDKTHTCPPCPAPEAAGGPSVFLFPPKPKDT |
| | | | LMISRTPEVTCVVVDVSHEDPEVKFNWYVDGVEVHN |
| | | | AKTKPREEQYNSTYRVVSVLTVLHQDWLNGKEYKC |
| | | | KVSNKALGAPIEKTISKAKGQPREPQVYTLPPSRDELT |
| | | | KNQVSLWCLVKGFYPSDIAVEWESNGQPENNYKTTP |
| | | | PVLDSDGSFFLYSKLTVDKSRWQQGNVFSCSVMHEA |
| | | | LHNHYTQKSLSLSPGK |
| EGFR | | SEQ ID | QVKLEESGGGSVQTGGSLRLTCAASGRTSRSYGMGW |
| | | NO: 376 | FRQAPGKEREFVSGISWRGDSTGYADSVKGRFTISRD |
| | | | NAKNTVDLQMNSLKPEDTAIYYCAAAAGSAWYGTL |
| | | | YEYDYWGQGTQVTVSSGTGSPVPSTPPTPSPSTPPTPS |
| | | | PSASEPKSCDKTHTCPPCPAPEAAGGPSVFLFPPKPKD |
| | | | TLMISRTPEVTCVVVDVSHEDPEVKFNWYVDGVEVH |
| | | | NAKTKPREEQYNSTYRVVSVLTVLHQDWLNGKEYK |
| | | | CKVSNKALGAPIEKTISKAKGQPREPQVYTLPPSRDEL |
| | | | TKNQVSLSCAVKGFYPSDIAVEWESNGQPENNYKTT |
| | | | PPVLDSDGSFFLVSKLTVDKSRWQQGNVFSCSVMHE |
| | | | ALHNHYTQKSLSLSPGK |
| EGFR | | SEQ ID | QVKLEESGGGSVQTGGSLRLTCAASGRTSRSYGMGW |
| | | NO: 378 | FRQAPGKEREFVSGISWRGDSTGYADSVKGRFTISRD |
| | | | NAKNTVDLQMNSLKPEDTAIYYCAAAAGSAWYGTL |
| | | | YEYDYWGQGTQVTVSSGTGSPVPSTPPTPSPSTPPTPS |
| | | | PSASEPKSCDKTHTCPPCPAPEAAGGPSVFLFPPKPKD |
| | | | TLMISRTPEVTCVVVDVSHEDPEVKFNWYVDGVEVH |
| | | | NAKTKPREEQYNSTYRVVSVLTVLHQDWLNGKEYK |
| | | | CKVSNKALGAPIEKTISKAKGQPREPQVYTLPPSRDEL |
| | | | TKNQVSLWCLVKGFYPSDIAVEWESNGQPENNYKTT |
| | | | PPVLDSDGSFFLYSKLTVDKSRWQQGNVFSCSVMHE |
| | | | ALHNHYTQKSLSLSPGK |
| EGFR | | SEQ ID | QVKLEESGGGSVQTGGSLRLTCAASGHTSRSYGMG |
| | | NO: 382 | WFRQAPGKEREFVSGISWRGDSTGYADSVKGRFTISR |
| | | | DNAKNTVDLQMNSLKPEDTAIYYCAAAAGSAWYHT |
| | | | LYEYDYWGQGTQVTVSSGTGGGGSGGGGSGGGGSG |
| | | | GGGSEPKSCDKTHTCPPCPAPEAAGGPSVFLFPPKPK |
| | | | DTLMISRTPEVTCVVVDVSHEDPEVKFNWYVDGVEV |
| | | | HNAKTKPREEQYNSTYRVVSVLTVLHQDWLNGKEY |
| | | | KCKVSNKALGAPIEKTISKAKGQPREPQVYTLPPSRD |
| | | | ELTKNQVSLSCAVKGFYPSDIAVEWESNGQPENNYK |
| | | | TTPPVLDSDGSFFLVSKLTVDKSRWQQGNVFSCSVM |
| | | | HEALHNHYTQKSLSLSPGK |
| EGFR | | SEQ ID | QVKLEESGGGSVQTGGSLRLTCAASGHTSRSYGMG |
| | | NO: 384 | WFRQAPGKEREFVSGISWRGDSTGYADSVKGRFTISR |
| | | | DNAKNTVDLQMNSLKPEDTAIYYCAAAAGSAWYHT |
| | | | LYEYDYWGQGTQVTVSSGTGGGGSGGGGSGGGGSG |
| | | | GGGSEPKSCDKTHTCPPCPAPEAAGGPSVFLFPPKPK |
| | | | DTLMISRTPEVTCVVVDVSHEDPEVKFNWYVDGVEV |
| | | | HNAKTKPREEQYNSTYRVVSVLTVLHQDWLNGKEY |
| | | | KCKVSNKALGAPIEKTISKAKGQPREPQVYTLPPSRD |
| | | | ELTKNQVSLWCLVKGFYPSDIAVEWESNGQPENNYK |
| | | | TTPPVLDSDGSFFLYSKLTVDKSRWQQGNVFSCSVM |
| | | | HEALHNHYTQKSLSLSPGK |
| EGFR | | SEQ ID | QVKLEESGGGSVQTGGSLRLTCAASGHTSRSYGMG |
| | | NO: 387 | WFRQAPGKEREFVSGISWRGDSTGYADSVKGRFTISR |
| | | | DNAKNTVDLQMNSLKPEDTAIYYCAAAAGSAWYHT |
| | | | LYEYDYWGQGTQVTVSSGTGSPVPSTPPTPSPSTPPTP |
| | | | SPSASEPKSCDKTHTCPPCPAPEAAGGPSVFLFPPKPK |
| | | | DTLMISRTPEVTCVVVDVSHEDPEVKFNWYVDGVEV |
| | | | HNAKTKPREEQYNSTYRVVSVLTVLHQDWLNGKEY |
| | | | KCKVSNKALGAPIEKTISKAKGQPREPQVYTLPPSRD |
| | | | ELTKNQVSLSCAVKGFYPSDIAVEWESNGQPENNYK |
| | | | TTPPVLDSDGSFFLVSKLTVDKSRWQQGNVFSCSVM |
| | | | HEALHNHYTQKSLSLSPGK |
| EGFR | | SEQ ID | QVKLEESGGGSVQTGGSLRLTCAASGHTSRSYGMG |
| | | NO: 389 | WFRQAPGKEREFVSGISWRGDSTGYADSVKGRFTISR |
| | | | DNAKNTVDLQMNSLKPEDTAIYYCAAAAGSAWYHT |
| | | | LYEYDYWGQGTQVTVSSGTGSPVPSTPPTPSPSTPPTP |
| | | | SPSASEPKSCDKTHTCPPCPAPEAAGGPSVFLFPPKPK |
| | | | DTLMISRTPEVTCVVVDVSHEDPEVKFNWYVDGVEV |
| | | | HNAKTKPREEQYNSTYRVVSVLTVLHQDWLNGKEY |
| | | | KCKVSNKALGAPIEKTISKAKGQPREPQVYTLPPSRD |
| | | | ELTKNQVSLWCLVKGFYPSDIAVEWESNGQPENNYK |
| | | | TTPPVLDSDGSFFLYSKLTVDKSRWQQGNVFSCSVM |
| | | | HEALHNHYTQKSLSLSPGK |

### Sequence Identity and Homology

[0286] Percent (%) sequence identity or homology is determined by conventional methods. (See e.g., Altschul et al. (1986), Bull. Math. Bio. 48:603 (1986), and Henikoff and Henikoff (1992), Proc. Natl. Acad. Sci. USA 89:10915). Briefly, two amino acid sequences can be aligned to optimize the alignment scores using a gap opening penalty of 10, a gap extension penalty of 1, and the “BLOSUM62” scoring matrix of Henikoff and Henikoff (Id.). The sequence identity or homology is then calculated as: ([Total number of identical matches]/[length of the longer sequence plus the number of gaps introduced into the longer sequence in order to align the two sequences])(100).

[0287] Various methods and software programs can be used to determine the homology between two or more peptides, such as NCBI BLAST, Clustal W, MAFFT, Clustal Omega, AlignMe, Praline, or another suitable method or algorithm. Pairwise sequence alignment can be used to identify regions of similarity that can indicate functional, structural and/or evolutionary relationships between two biological sequences (e.g., amino acid or nucleic acid sequences). In addition, multiple sequence alignment (MSA) is the alignment of three or more biological sequences. From the output of MSA applications, homology can be inferred and the evolutionary relationship between the sequences assessed. As used herein, “sequence homology” and “sequence identity” and “percent (%) sequence identity” and “percent (%) sequence homology” are used interchangeably to mean the sequence relatedness or variation, as appropriate, to a reference polynucleotide or amino acid sequence.

[0288] Additionally, there are several established algorithms available to align two amino acid sequences. For example, the “FASTA” similarity search algorithm of Pearson and Lipman can be a suitable protein alignment method for examining the level of sequence identity or homology shared by an amino acid sequence of a peptide disclosed herein and the amino acid sequence of a peptide variant. The FASTA algorithm is described, for example, by Pearson and Lipman, Proc. Nat'l Acad. Sci. USA 85:2444 (1988), and by Pearson, Meth. Enzymol. 183:63 (1990). Briefly, FASTA first characterizes sequence similarity by identifying regions shared by the query sequence (e.g., SEQ ID NO: 1) and a test sequence that has either the highest density of identities (if the ktup variable is 1) or pairs of identities (if ktup=2), without considering conservative amino acid substitutions, insertions, or deletions. The ten regions with the highest density of identities are then rescored by comparing the similarity of all paired amino acids using an amino acid substitution matrix, and the ends of the regions are “trimmed” to include only those residues that contribute to the highest score. If there are several regions with scores greater than the “cutoff” value (calculated by a predetermined formula based upon the length of the sequence and the ktup value), then the trimmed initial regions are examined to determine whether the regions can be joined to form an approximate alignment with gaps. Finally, the highest scoring regions of the two amino acid sequences are aligned using a modification of the Needleman-Wunsch-Sellers algorithm (Needleman and Wunsch, J Mol. Biol. 48:444 (1970); Sellers, Siam J. Appl. Math. 26:787 (1974)), which allows for amino acid insertions and deletions. For example, illustrative parameters for FASTA analysis are: ktup=1, gap opening penalty=10, gap extension penalty=1, and substitution matrix=BLOSUM62. These parameters can be introduced into a FASTA program by modifying the scoring matrix file (“SMATRIX”), as explained in Appendix 2 of Pearson, Meth. Enzymol. 183:63 (1990).

[0289] FASTA can also be used to determine the sequence identity or homology of nucleic acid sequences or molecules using a ratio as disclosed above. For nucleic acid sequence comparisons, the ktup value can range between one to six, preferably from three to six, most preferably three, with other parameters set as described herein.

[0290] Some examples of common amino acids that are a “conservative amino acid substitution” are illustrated by a substitution among amino acids within each of the following groups: (1) glycine, alanine, valine, leucine, and isoleucine, (2) phenylalanine, tyrosine, and tryptophan, (3) serine and threonine, (4) aspartate and glutamate, (5) glutamine and asparagine, and (6) lysine, arginine and histidine. The BLOSUM62 table is an amino acid substitution matrix derived from about 2,000 local multiple alignments of protein sequence segments, representing highly conserved regions of more than 500 groups of related proteins (Henikoff and Henikoff, Proc. Nat'l Acad. Sci. USA 89:10915 (1992)). Accordingly, the BLOSUM62 substitution frequencies can be used to define conservative amino acid substitutions that can be introduced into the amino acid sequences of the present invention. Although it is possible to design amino acid substitutions based solely upon chemical properties (as discussed above), the language “conservative amino acid substitution” preferably refers to a substitution represented by a BLOSUM62 value of greater than −1. For example, an amino acid substitution is conservative if the substitution is characterized by a BLOSUM62 value of 0, 1, 2, or 3. According to this system, preferred conservative amino acid substitutions are characterized by a BLOSUM62 value of at least 1 (e.g., 1, 2 or 3), while more preferred conservative amino acid substitutions are characterized by a BLOSUM62 value of at least 2 (e.g., 2 or 3).

[0291] Determination of amino acid residues that are within regions or domains that are critical to maintaining structural integrity can be determined. Within these regions one can determine specific residues that can be more or less tolerant of change and maintain the overall tertiary structure of the molecule. Methods for analyzing sequence structure include, but are not limited to, alignment of multiple sequences with high amino acid or nucleotide identity or homology and computer analysis using available software (e.g., the Insight II® viewer and homology modeling tools; MSI, San Diego, Calif.), secondary structure propensities, binary patterns, complementary packing and buried polar interactions (Barton, G. J., Current Opin. Struct. Biol. 5:372-6 (1995) and Cordes, M. H. et al., Current Opin. Struct. Biol. 6:3-10 (1996)). In general, when designing modifications to molecules or identifying specific fragments, determination of structure can typically be accompanied by evaluating activity of modified molecules.

### Engineered Binding Peptides

[0292] A peptide of the present disclosure (e.g., a TfR-binding peptide, a target-binding peptide, or a selective depletion complex) can be engineered to improve or alter a property of the peptide. For example, a peptide can be modified to alter the affinity of the peptide for a binding partner (e.g., a target molecule or a TfR). In some embodiments, a peptide can be modified to alter binding affinity in a pH-dependent manner. A peptide can be modified my introducing one or more amino acid variations into the peptide sequence and testing the effect of the variation on peptide properties (e.g., binding affinity).

[0293] In some embodiments, a peptide or a library of peptides is designed in silico without derivation from a naturally occurring scaffold of a knotted peptide. In other embodiments, a peptide or a library of peptides is designed in silico by derivation, grafting relevant protein-binding residues, or conserved residues in the protein-binding interface a naturally occurring peptide or protein known to bind to a protein or receptor of interest. In some embodiments, the peptide (e.g., a TfR-binding peptide of SEQ ID NO: 96, SEQ ID NO: 65-SEQ ID NO: 95, SEQ ID NO: 97-SEQ ID NO: 128, SEQ ID NO: 220-SEQ ID NO: 222, or SEQ ID NO: 1-SEQ ID NO: 64) is a simple helix-turn-helix. In some embodiments, the helix-turn-helix can be used for pharmacophore transfer onto other scaffolds, for example engraftment of the required TfR-engaging surface onto the helix-turn-helix scaffold using fusion tagging.

[0294] In some embodiments, a peptide comprising SEQ ID NO: 1 is used as a scaffold or base sequence for further modifications, including addition, deletion, or amino acid substitution. In some embodiments, short sequences of amino acid residues such as GS are added at the N-terminus of a peptide. In some embodiments, peptides lack GS at the N-terminus. In some instances, peptides undergo one or more post-translational modifications.

[0295] In some embodiments, a peptide capable of binding TfR and transcytosis across a cell membrane comprises a sequence with at least 70%, 71%, 72%, 73%, 74%, 75%, 76%, 77%, 78%, 79%, 80%, 81%, 82%, 83%, 84%, 85%, 86%, 87%, 88%, 89%, 90%, 91%, 92%, 93%, 94%, 95%, 96%, 97%, 98%, 99%, or 100% sequence identity with any one of the exemplary peptide sequences listed in TABLE 1 (SEQ ID NO: 96, SEQ ID NO: 65-SEQ ID NO: 95, SEQ ID NO: 97-SEQ ID NO: 128, SEQ ID NO: 220-SEQ ID NO: 222, or SEQ ID NO: 1-SEQ ID NO: 64), or a functional fragment thereof. Two or more peptides can share a degree of sequence identity or homology and share similar properties in vivo. For instance, a peptide can share a degree of sequence identity or homology with any one of the peptides of SEQ ID NO: 96, SEQ ID NO: 65-SEQ ID NO: 95, SEQ ID NO: 97-SEQ ID NO: 128, SEQ ID NO: 220-SEQ ID NO: 222, or SEQ ID NO: 1-SEQ ID NO: 64. In some embodiments, one or more peptides of the present disclosure have up to about 20% pairwise sequence identity or homology, up to about 25% pairwise sequence identity or homology, up to about 30% pairwise sequence identity or homology, up to about 35% pairwise sequence identity or homology, up to about 40% pairwise sequence identity or homology, up to about 45% pairwise sequence identity or homology, up to about 50% pairwise sequence identity or homology, up to about 55% pairwise sequence identity or homology, up to about 60% pairwise sequence identity or homology, up to about 65% pairwise sequence identity or homology, up to about 70% pairwise sequence identity or homology, up to about 75% pairwise sequence identity or homology, up to about 80% pairwise sequence identity or homology, up to about 85% pairwise sequence identity or homology, up to about 90% pairwise sequence identity or homology, up to about 95% pairwise sequence identity or homology, up to about 96% pairwise sequence identity or homology, up to about 97% pairwise sequence identity or homology, up to about 98% pairwise sequence identity or homology, up to about 99% pairwise sequence identity or homology, up to about 99.5% pairwise sequence identity or homology, or up to about 99.9% pairwise sequence identity or homology. In some embodiments, one or more peptides of the disclosure have at least about 20% pairwise sequence identity or homology, at least about 25% pairwise sequence identity or homology, at least about 30% pairwise sequence identity or homology, at least about 35% pairwise sequence identity or homology, at least about 40% pairwise sequence identity or homology, at least about 45% pairwise sequence identity or homology, at least about 50% pairwise sequence identity or homology, at least about 55% pairwise sequence identity or homology, at least about 60% pairwise sequence identity or homology, at least about 65% pairwise sequence identity or homology, at least about 70% pairwise sequence identity or homology, at least about 75% pairwise sequence identity or homology, at least about 80% pairwise sequence identity or homology, at least about 85% pairwise sequence identity or homology, at least about 90% pairwise sequence identity or homology, at least about 95% pairwise sequence identity or homology, at least about 96% pairwise sequence identity or homology, at least about 97% pairwise sequence identity or homology, at least about 98% pairwise sequence identity or homology, at least about 99% pairwise sequence identity or homology, at least about 99.5% pairwise sequence identity or homology, at least about 99.9% pairwise sequence identity or homology with a second peptide.

[0296] In some embodiments, peptides that exhibit an improved TfR receptor binding show improved transcytosis function. In some cases, peptides that exhibit an improved TfR receptor binding show no or small changes in transcytosis function. In some cases, peptides that exhibit an improved TfR receptor binding show reduced transcytosis function. In some embodiments, the K_{A} and K_{D} values of a TfR-binding peptide can be modulated and optimized (e.g., via amino acid substitutions) to provide an optimal ratio of TfR-binding affinity and efficient transcytosis function.

[0297] In some instances, the peptide or peptide complex is any one of SEQ ID NO: 96, SEQ ID NO: 65-SEQ ID NO: 95, SEQ ID NO: 97-SEQ ID NO: 128, SEQ ID NO: 220-SEQ ID NO: 222, or SEQ ID NO: 1-SEQ ID NO: 64, or a functional fragment thereof. In other embodiments, the peptide or peptide complex of the disclosure further comprises a peptide with 99%, 95%, 90%, 85%, or 80% sequence identity or homology to any one of SEQ ID NO: 96, SEQ ID NO: 65-SEQ ID NO: 95, SEQ ID NO: 97-SEQ ID NO: 128, SEQ ID NO: 220-SEQ ID NO: 222, or SEQ ID NO: 1-SEQ ID NO: 64 or functional fragment thereof.

[0298] In other instances, the peptide or peptide complex can be a peptide that is homologous to any one of SEQ ID NO: 96, SEQ ID NO: 65-SEQ ID NO: 95, SEQ ID NO: 97-SEQ ID NO: 128, SEQ ID NO: 220-SEQ ID NO: 222, or SEQ ID NO: 1-SEQ ID NO: 64, or a functional fragment thereof. As further described herein, the term “homologous” can be used herein to denote peptides or peptide complexes having at least 70%, at least 80%, at least 90%, at least 95%, or greater than 95% sequence identity or homology to a sequence of any one of SEQ ID NO: 96, SEQ ID NO: 65-SEQ ID NO: 95, SEQ ID NO: 97-SEQ ID NO: 128, SEQ ID NO: 220-SEQ ID NO: 222, or SEQ ID NO: 1-SEQ ID NO: 64 or a functional fragment thereof. In various embodiments, a fragment can be least 5, at least 10, at least 15, at least 20, at least 25, at least 30, at least 35, at least 40, at least 45, at least 50, at least 100, at least 150, at least 200, at least 250, at least 300, at least 350, at least 400, at least 450, at least 500, at least 600, at least 700, at least 800, at least 900 or at least 1000 amino acids in length. In various embodiments, fragments can be at most 1000, at most 900, at most 800, at most 700, at most 600, at most 500, at most 450, at most 400, at most 350, at most 300, at most 250, at most 200, at most 150, at most 100, at most 50, at most 45, at most 40, at most 35, at most 30, at most 25, at most 20, at most 15, at most 10, or at most 5 amino acids in length. In some embodiments, a fragment can be from about 5 to about 50, from about 10 to about 50, from about 10 to about 40, from about 10 to about 30, or from about 10 to about 20 amino acids in length.

[0299] In still other instances, the nucleic acid molecules that encode a peptide or peptide complex of any one of SEQ ID NO: 96, SEQ ID NO: 65-SEQ ID NO: 95, SEQ ID NO: 97-SEQ ID NO: 128, SEQ ID NO: 220-SEQ ID NO: 222, or SEQ ID NO: 1-SEQ ID NO: 64 can be identified by either a determination of the sequence identity or homology of the encoded peptide amino acid sequence with the amino acid sequence of any one of SEQ ID NO: 96, SEQ ID NO: 65-SEQ ID NO: 95, SEQ ID NO: 97-SEQ ID NO: 128, SEQ ID NO: 220-SEQ ID NO: 222, or SEQ ID NO: 1-SEQ ID NO: 64, or by a nucleic acid hybridization assay. Such peptide variants or peptide complex variants of any one of SEQ ID NO: 96, SEQ ID NO: 65-SEQ ID NO: 95, SEQ ID NO: 97-SEQ ID NO: 128, SEQ ID NO: 220-SEQ ID NO: 222, or SEQ ID NO: 1-SEQ ID NO: 64 can be characterized as nucleic acid molecules (1) that remain hybridized with a nucleic acid molecule having the nucleotide sequence of any one of SEQ ID NO: 96, SEQ ID NO: 65-SEQ ID NO: 95, SEQ ID NO: 97-SEQ ID NO: 128, SEQ ID NO: 220-SEQ ID NO: 222, or SEQ ID NO: 1-SEQ ID NO: 64 (or its complement) under highly stringent washing conditions, in which the wash stringency is equivalent to 0.1×−0.2×SSC with 0.1% SDS at 50-65° C., and (2) that encode a peptide having at least 70%, at least 80%, at least 90%, at least 95% or greater than 95% sequence identity or homology to the amino acid sequence of any one of SEQ ID NO: 96, SEQ ID NO: 65-SEQ ID NO: 95, SEQ ID NO: 97-SEQ ID NO: 128, SEQ ID NO: 220-SEQ ID NO: 222, or SEQ ID NO: 1-SEQ ID NO: 64.

### Affinity Maturation

[0300] A peptide of the present disclosure (e.g., a target-binding peptide, TfR-binding peptide, or a selective depletion complex) can be identified or modified through affinity maturation. For example, a target-binding peptide that binds a target of interest can be identified by affinity maturation of a binding peptide (e.g., a CDP, a nanobody, an affibody, a DARPin, a centyrin, a nanofittin, an adnectin, or an antibody fragment). A binding peptide can undergo affinity maturation by generating a library of every possible point mutation, or in the case of a CDP, every possible non-cysteine point mutation. The variant library can be expressed via surface display (e.g., in yeast or mammalian cells) and screened for binding to a binding partner (e.g., a target molecule or TfR). Library members with increased binding affinity relative to the initial peptide or relative to other members of the variant library can undergo subsequent rounds of maturation. During each round, a variant library of every possible non-cysteine point mutation is generated and screened. In some embodiments, a peptide can undergo 1, 2, 3, 4, 5, 6, 7, 8, 9, or 10 rounds of affinity maturation to identify a peptide with improved binding affinity to the binding partner of interest (e.g., a target molecule or TfR). Variants can be identified by Sanger sequencing, next generation sequencing, or high throughput sequencing (e.g., Illumina sequencing).

[0301] In some embodiments, a peptide (e.g., a TfR-binding peptide or a target-binding peptide) can be selected for pH-independent binding. For example, a peptide can be selected for high affinity binding to a binding partner (e.g., a target molecule or a TfR) at both extracellular pH (about pH 7.4) and at endosomal pH (such as about pH 5.5). A peptide with pH-independent binding can bind to a binding partner with a dissociation constant (K_{D}) of less than 50 μM, less than 5 μM, less than 500 nM, less than 100 nM, less than 40 nM, less than 30 nM, less than 20 nM, less than 10 nM, less than 5 nM, less than 2 nM, less than 1 nM, less than 0.5 nM, less than 0.4 nM, less than 0.3 nM, less than 0.2 nM, or less than 0.1 nM at extracellular pH (about pH 7.4). In some embodiments, a target-binding peptide with pH-dependent binding can bind a target molecule with a dissociation constant (K_{D}) of less than 50 μM, less than 5 μM, less than 500 nM, less than 100 nM, less than 40 nM, less than 30 nM, less than 20 nM, less than 10 nM, less than 5 nM, less than 2 nM, less than 1 nM, less than 0.5 nM, less than 0.4 nM, less than 0.3 nM, less than 0.2 nM, or less than 0.1 nM at endosomal pH (such as about pH 5.5). In some embodiments the TfR-binding peptides are stable at endosomal pH, and do not release in the endosome for example under acidic conditions, such as pH 6.9, pH 6.8, pH 6.7, pH 6.6, pH 6.5, pH 6.4, pH 6.3, pH 6.2, pH 6.1, pH 6.0, pH 5.9, pH 5.8, pH 5.7, pH 5.6, pH 5.5, pH 5.4, pH 5.3, pH 5.2, pH 5.1, pH 5.0, pH 4.9, pH 4.8, pH 4.7, pH 4.6, pH 4.5, or lower. Conversely, a peptide that has high affinity for binding to a selected target and used in selective depletion complexes as the peptide or peptide complex that binds such selected target and is released in the endosome for degradation within the cell can be a pH-dependent target-binding CDP such that it is released in the endosome. In some embodiments the target-binding peptides are less stable at endosomal pH, and release wholly or in part in the endosome for example under acidic conditions, such as pH7.3, pH7.2, pH7.1, pH7.0, pH6.9, pH6.8, pH6.7, pH6.6, pH6.5, pH6.4, pH6.3, pH6.2, pH 6.1, pH6.0, pH5.9, pH5.8, pH5.7, pH5.6, pH5.5, pH5.4, pH5.3, pH5.2, pH5.1, pH5.0, pH4.9, pH4.8, pH4.7, pH4.6, pH4.5, or lower.

pH-Dependent Binding

[0302] The peptides of the present disclosure (e.g., a target binding peptide or a TfR-binding peptide) can be modified for pH-dependent binding properties. Imparting pH-dependent binding to a target-binding peptide (e.g., a target-binding CDP) can be performed in three stages. First, a library of peptide variant containing histidine (His) point mutations can be designed. Histidine amino acids are introduced into the target-binding peptide because His is the only natural amino acid whose side chain has a pKₐ value between neutral (pH 7.4) and acidic (pH<6) endosomal conditions, and this change of charge as pH changes can alter binding, either directly (e.g., changing charge-charge interaction upon formation of a positive charge at low pH) or indirectly (e.g., the change in charge imparts a subtle change in the structure of the target-binding peptide, disrupting an interface between the target molecule and the target-binding peptide). In some embodiments, a variant screen of the target-binding peptide can be implemented by generating double-His doped libraries. For example, a double-His doped library of a target-binding CDP can comprise a library where every non-Cys, non-His residue is substituted with a His amino acid one- or two-at-a-time. A variant library can be expressed in cells (e.g., yeast cells or mammalian cells) via surface display, with each target-binding peptide variant containing one or two His substitutions. Target-binding peptide variants can be tested for maintenance of binding under neutral pH (about pH 7.4), and for reduced binding under low pH (about pH 6.0 or about pH 5.5). Variants that demonstrated reduced binding affinity under low pH as compared to neutral pH can be identified as target-binding peptides with pH-dependent binding.

[0303] In some embodiments, the target-binding peptides of the present disclosure (e.g., histidine-containing or histidine-enriched target-binding peptides) can have a high target binding affinity at physiologic extracellular pH but a significantly reduced binding affinity at lower pH levels such as endosomal pH of 5.5. In some cases, the target-binding peptides of the present disclosure can be optimized for improved intra-vesicular (e.g., intra-endosomal) and/or intracellular delivery function while retaining high target binding capabilities. In some cases, histidine scans and comparative binding experiments can be performed to develop and screen for such peptides. In some embodiments, an amino acid residue in a peptide of the present disclosure is substituted with a different amino acid residue to alter a pH-dependent binding affinity to a target molecule. The amino acid substitution can increase a binding affinity at low pH, increase a binding affinity at high pH, decrease a binding affinity at low pH, decrease a binding affinity at high pH, or a combination thereof.

[0304] In some embodiments, a target-binding peptide with pH-dependent binding can bind a target molecule with a dissociation constant (K_{D}) of less than 50 μM, less than 5 μM, less than 500 nM, less than 100 nM, less than 40 nM, less than 30 nM, less than 20 nM, less than 10 nM, less than 5 nM, less than 2 nM, less than 1 nM, less than 0.5 nM, less than 0.4 nM, less than 0.3 nM, less than 0.2 nM, or less than 0.1 nM at extracellular pH (such as about pH 7.4). In some embodiments, a target-binding peptide with pH-dependent binding can bind a target molecule with a dissociation constant (K_{D}) at least 1 nM, at least 2 nM, at least 5 nM, at least 10 nM, at least 20 nM, at least 50 nM, of at least 100 nM, at least 200 nM, at least 500 nM, at least 1 μM, at least 2 μM, at least 5 μM, at least 10 μM, at least 20 μM, at least 50 μM, at least 100 μM, at least 500 μM, at least 1 mM, at least 2 mM, at least 5 mM, at least 10 mM, at least 20 mM, at least 50 mM, at least 100 mM, at least 200 mM, at least 500 mM, or at least 1 M at endosomal pH (such as about pH 5.5). In some embodiments the TfR-binding peptides are stable at endosomal pH, and do not release in the endosome for example under acidic conditions, such as pH 6.9, pH 6.8, pH 6.7, pH 6.6, pH 6.5, pH 6.4, pH 6.3, pH 6.2, pH 6.1, pH 6.0, pH 5.9, pH 5.8, pH 5.7, pH 5.6, pH 5.5, pH 5.4, pH 5.3, pH 5.2, pH 5.1, pH 5.0, pH 4.9, pH 4.8, pH 4.7, pH 4.6, pH 4.5, or lower. Conversely, a peptide that has high affinity for binding to a selected target and used in selective depletion complexes as the peptide or peptide complex that binds such selected target and is released in the endosome for degradation within the cell can be a pH-dependent target-binding CDP such that it is released in the endosome. In some embodiments the target-binding peptides are less stable at endosomal pH, and release wholly or in part in the endosome for example under acidic conditions, such as pH 7.3, pH 7.2, pH 7.1, pH 7.0, pH 6.9, pH 6.8, pH 6.7, pH 6.6, pH 6.5, pH 6.4, pH 6.3, pH 6.2, pH 6.1, pH 6.0, pH 5.9, pH 5.8, pH 5.7, pH 5.6, pH 5.5, pH 5.4, pH 5.3, pH 5.2, pH 5.1, pH 5.0, pH 4.9, pH 4.8, pH 4.7, pH 4.6, pH 4.5, or lower.

### Methods of Using Selective Depletion Complexes

[0305] The selective depletion complexes of the present disclosure may be used to exert an effect on a cell, tissue, or subject. The effect may be a therapeutic, pharmacological, biological, or biochemical effect. In some embodiments, the effect may result from selective depletion of a target molecule to which the selective depletion complex binds. In some embodiments, the effect may result from ternary complex formation between a target, a receptor, and a selective depletion complex that binds the target and the receptor.

### Selective Depletion of Target Molecules

[0306] Described herein are methods of selectively depleting a target molecule using a composition of the present disclosure (e.g., a selective depletion complex). In some embodiments, a method of the present disclosure can comprise selectively recruiting a molecule to an endocytic compartment via transferrin receptor-mediated endocytosis and enriching the target molecule in the lysosome. A selective depletion complex (e.g., a complex comprising a receptor-binding peptide conjugated to a target-binding peptide) can bind to the receptor via the receptor-binding peptide and to a target molecule (e.g., a soluble protein, an extracellular protein, or a cell surface protein). The target molecule can be delivered to an endocytic compartment via receptor-mediated endocytosis of the receptor and the selective depletion molecule. In the endocytic compartment, the selective depletion complex can remain bound to the receptor, and the target molecule can be released from the selective depletion complex as the endocytic compartment acidifies. The selective depletion molecule can be recycled to the cell surface along with the receptor, and the target molecule can continue to the lysosome where it is degraded. In some embodiments, the target molecule can remain in the lysosome without being degraded, resulting in enrichment of the target molecule in the lysosome, such as lysosomal enzymes in lysosomal storage diseases.

[0307] The methods of the present disclosure for selectively depleting a target molecule or for selectively enriching a target molecule in the lysosome can be used to treat a disease or condition associated with the target molecule. For example, selective depletion of a target molecule associated with neurodegeneration can be used to treat a neurodegenerative disease. In another example, selective depletion of a target molecule associated with cancer can be used to treat the cancer. Depletion of a cell surface molecule can allow the cancer cell to be targeted by the immune system, to lose checkpoint inhibition, can disable survival signaling, or remove drug resistance pumps. In another example, selective depletion of an inflammatory molecule can be used to treat harmful inflammatory signaling. In another example, selective enrichment in the lysosome of a lysosomal enzyme associated with a lysosomal storage disease can be used to treat the lysosomal storage disease. In this example, a lysosomal enzyme can be administered in co-therapy with the target-depleting complex, such that the target depleting complex drives the lysosomal enzyme into the lysosomal compartment. A method of treating a disease or condition can comprise contacting a cell (e.g., a cell expressing the receptor) with a selective depletion complex of the present disclosure. In some embodiments, the selective depletion complex can be administered to a subject (e.g., a human subject) having a disease or condition (e.g., a neurodegenerative disease, a cancer, harmful inflammation, or a lysosomal storage disease).

[0308] TfR is a ubiquitous protein, as all mammalian cells require iron and therefore take up transferrin through this constitutive pathway. By this mechanism, virtually any target tissue would be amenable to the selective depletion methods or selective enrichment methods of the present disclosure comprising a TfR-binding peptide. Tumor tissue can be particularly well-suited for the methods of the present disclosure as most tumors are enriched for TfR, which can impart natural tumor selectivity in the selective depletion molecules.

[0309] Liver tissue can also be highly enriched for TfR and thus be a favorable tissue for selective depletion methods. In some embodiments, the selective depletion complexes of the present disclosure (e.g., selective depletion complexes comprising a CDP) can be stable in the liver for extended periods of time. For example, a selective depletion complex of the present disclosure can have a half-life in the liver of at least about 1, at least about 2, at least about 3, at least about 4, at least about 5, at least about 6, at least about 7, at least about 8, at least about 9, or at least about 10 hours. Serum proteins, which can already largely be subject to hepatic metabolism as a class, could be targeted for selective depletion with relatively low doses of selective depletion complexes. Serum half-life of the selective depletion complexes of the present disclosure could be improved to create a molecule that requires infrequent dosing, for example by addition of a serum half-life extension peptide. Selective depletion complexes with a shorter half-life can serve as an acute target elimination drug, for example to treat harmful inflammatory signaling.

[0310] A selective depletion complex can be administered to a subject systemically or peripherally and can accumulate in tissue with high levels of TfR expression (e.g., tumor tissue, kidney tissue, spleen, bone marrow, or liver tissue). In some embodiments, a selective depletion complex can be administered to a subject systemically or peripherally and can accumulate in kidney tissue or liver tissue. In some embodiments, a selective depletion complex can comprise a tissue targeting domain and can accumulate in the target tissue upon administration to a subject. For example, selective depletion complexes can be conjugated to, linked to, or fused to a molecule (e.g., small molecule, peptide, or protein) with targeting or homing function for a cell of interest or a target protein located on the surface or inside said cell. In some embodiments, a selective depletion complex can be administered to a subject orally and can reach the gastrointestinal tract. Orally administered selective depletion complexes can be used for clearance of disease-associated proteins in the gastrointestinal tract.

[0311] In some embodiments, a selective depletion complex of the present disclosure can be genetically encoded into a benign cell with a secretory phenotype. The selective depletion complex can be expressed by the secretory cell and administered as a secreted molecule in a localized cellular therapy. In some embodiments, a gene encoding a selective depletion complex can be delivered as a gene therapy to a tissue of interest (e.g., liver, hematopoietic, kidney, skin, tumor, central nervous system (CNS), or neurons).

[0312] In some embodiments, a target-binding peptide of a selective depletion construct may comprise a miniprotein, a nanobody, an antibody, an IgG, an antibody fragment, a Fab, a F(ab)2, an scFv, an (scFv)2, a DARPin, or an affibody. In some embodiments, the target-binding peptide may comprise a cystine-dense peptide, an affitin, an adnectin, an avimer, a Kunitz domain, a nanofittin, a fynomer, a bicyclic peptide, a beta-hairpin, or a stapled peptide. For example, the target-binding peptide may comprise an antibody single chain variable fragment (scFv) that binds PD-L1, FGFR-1, VEGF, PD-1, EGFR, CD38, GD2, SLAMF7, CTLA-4, CCR4, CD20, PDGFRα, VEGFR2, HER2, CD33, CD30, CD22, CD79B, Nectin-4, or TROP2 and has been modified for pH-dependent binding. A target-binding peptide of a selective depletion complex may bind to a target molecule, such as a target molecule with clinical relevance. In some embodiments, a target molecule may be a protein that is over-expressed or over-activated in a disease or condition. For example, a target molecule may be a transmembrane protein involved in oncogenic signaling, immune suppression, or pro-inflammatory signaling. Examples of target molecules that may be targeted by a target-binding peptide of the present disclosure include but are not limited to CD3, CD47, CD28, CD137, CD89, CD16, CD29, CD44, CD71, CD73, CD90, CD105, CD166, CD27, CD39, CD24, CD25, CD74, CD40L, MUC1, MUC16, MUC2, MUC5AC, MUC4, OX40, 4-1BB, HLA-G, LAG3, Tim3, TIGIT, GITR, TCR, TNF-α, EGFR, EGFRvIII, TKI-resistant EGFR, HER2, ERBB3, PDGFR, FGF, VEGF, VEGFR, IGFR1, CTLA4, STRO1, complement factor C4, complement factor C1q, complement factor C1s, complement factor C1r, complement factor C3, complement factor C3a, complement factor C3b, complement factor C5, complement factor C5a, TGFβ, PCSK9, P2Y6, HER3, RANK, tau, amyloid ß, huntingtin, α-synuclein, glucocerebrosidase, α-glucosidase, IL-1, IL-1R, IL-1α, IL-1β, IL-2, IL-2R, IL-4, IL-5, IL-6, IL-6R, IL-10, IL-10R, IL-17, IL-23, IL-12, p40, a member of the B7 family, c-Met, SIGLEC, MCP-1, an MHC, an MHC I, an MHC II, PD-1, and PD-L1.

[0313] Endocytosis and subsequent degradation of the target molecule by a selective depletion complex may treat (e.g., eliminate, reduce, slow progression of, or treat symptoms of) a disease or condition associated with the target molecule (e.g., CD3, CD47, CD28, CD137, CD89, CD16, CD29, CD44, CD71, CD73, CD90, CD105, CD166, CD27, CD39, CD24, CD25, CD74, CD40L, MUC1, MUC16, MUC2, MUC5AC, MUC4, OX40, 4-1BB, HLA-G, LAG3, Tim3, TIGIT, GITR, TCR, TNF-α, EGFR, EGFRvIII, TKI-resistant EGFR, HER2, ERBB3, PDGFR, FGF, VEGF, VEGFR, IGFR1, CTLA4, STRO1, complement factor C4, complement factor C1q, complement factor C1s, complement factor C1r, complement factor C3, complement factor C3a, complement factor C3b, complement factor C5, complement factor C5a, TGFβ, PCSK9, P2Y6, HER3, RANK, tau, amyloid ß, huntingtin, α-synuclein, glucocerebrosidase, α-glucosidase, IL-1, IL-1R, IL-1α, IL-1β, IL-2, IL-2R, IL-4, IL-5, IL-6, IL-6R, IL-10, IL-10R, IL-17, IL-23, IL-12, p40, a member of the B7 family, c-Met, SIGLEC, MCP-1, an MHC, an MHC I, an MHC II, PD-1, or PD-L1). In some embodiments, the target molecule is over-expressed in the disease or condition and depleting the target molecule reduces the level of the target molecule, thereby treating the disease or condition. In some embodiments, the target molecule accumulates in the disease or condition and depleting the target molecule clears or reduces the accumulation, thereby treating the disease or condition. In some embodiments, the target molecule is hyper-activated or over-stimulated, and depleting the target molecule reduces a level of activity of the target molecule, thereby treating the disease or condition. Examples of diseases that may be treated using a selective depletion complex include cancers, (e.g., non-small-cell lung cancer, primary non-small-cell lung cancer, metastatic non-small-cell lung cancer, head and neck cancer, head and neck squamous cell carcinoma, glioblastoma, brain cancer, metastatic brain cancer, colorectal cancer, colon cancer, tyrosine kinase inhibitor (TKI)-resistant cancer, cetuximab-resistant cancer, necitumumab-resistant cancer, panitumumab-resistant cancer, local cancer, regionally advanced cancer, recurrent cancer, metastatic cancer, refractory cancer, KRAS wildtype cancer, KRAS mutant cancers, or exon20 mutant non-small-cell lung cancer), inflammation, inflammatory conditions, neurological conditions (e.g., neuroinflammation, neuroinflammatory disease, stroke, traumatic brain injury, Alzheimer's disease, or other tauopathies including neurofibrillary tangle dementia, chronic traumatic encephalopathy (CTE), aging-related tau astrogliopathy, frontotemporal dementia, parkinsonism, progressive supranuclear palsy, corticobasal degeneration, lytico-bodig disease, ganglioglioma, meningioangiomatosis, or subacute sclerosing panencephalitis).

[0314] Administration of a selective depletion complex of the present disclosure may be combined with an additional therapy to treat a disease or condition. For example, administration of a selective depletion complex to treat a cancer may be combined with administration of radiation therapy, chemotherapy, platinum therapy, or anti-metabolic therapy. In some embodiments, the additional therapy may comprise administering fluorouracil, FOLFIRI, irinotecan, FOLFOX, gemcitabine, or cisplatin to the subject.

### Ternary Complex Formation

[0315] Described herein are methods of forming a ternary complex between a target molecule, a receptor, and a selective depletion complex comprising a receptor-binding peptide and a target-binding peptide. The ternary complex may form through binding of the receptor-binding peptide to the receptor and binding of the target-binding peptide to the target. Ternary complex formation between the target, the receptor, and the selective depletion complex may exert a therapeutic, pharmacological, biological, or biochemical effect on a cell, tissue, or subject expressing the target and the receptor. In some embodiments, formation of a ternary complex between a receptor, a target, and a selective depletion complex may increase recycling or turnover of the target molecule, the receptor, or both. Increased recycling or turnover of the target or the receptor may alter (e.g., increase) activity of the target or the receptor, thereby exerting a therapeutic, pharmacological, biological, or biochemical effect.

[0316] Formation of the ternary complex may exert a therapeutic, pharmacological, biological, or biochemical by recruiting the target molecule to the receptor. Recruitment of the target molecule to the receptor may promote a binding interaction between the receptor and the target. In some embodiments, subsequent recycling of the receptor and the target may facilitate the therapeutic, pharmacological, biological, or biochemical effect. In some embodiments, formation of the ternary complex may stabilize the interaction between the target and the receptor.

### Physicochemical Properties of Peptides

[0317] In some embodiments, a peptide of the present disclosure (e.g., a TfR-binding peptide, a target binding peptide, or a selective depletion complex) can comprise a wide range of physicochemical properties such as molecular size and structure, pH, isoelectric point, and overall molecular net charge. These parameters can have an effect on the peptides ability to bind TfR, bind a target molecule, promote transcytosis, transport of cargo molecules across cell barrier such as the BBB, or combinations thereof.

[0318] A peptide of the present disclosure can comprise at least one amino acid residue in D configuration. In some embodiments, a peptide is about 5-100 amino acid residues long. In some embodiments, a peptide is about 10-90 amino acid residues long. In some embodiments, a peptide is about 15-80 amino acid residues long. In some embodiments, a peptide is about 15-75 amino acid residues long. In some embodiments, a peptide is about 15-70 amino acid residues long. In some embodiments, a peptide is about 20-65 amino acid residues long. In some embodiments, a peptide is about 20-60 amino acid residues long. In some embodiments, a peptide is about 25-55 amino acid residues long. In some embodiments, a peptide is about 25-50 amino acid residues long. In some embodiments, a peptide is about 25-40 amino acid residues long. In some embodiments, a peptide is about 11-35 amino acid residues long. In some embodiments, a peptide is about 10-25 amino acid residues long.

[0319] In some embodiments, a peptide is at least 5 amino acid residues long. In some embodiments, a peptide is at least 10 amino acid residues long. In some embodiments, a peptide is at least 15 amino acid residues long. In some embodiments, a peptide is at least 20 amino acid residues long. In some embodiments, a peptide is at least 25 amino acid residues long. In some embodiments, a peptide is at least 30 amino acid residues long. In some embodiments, a peptide is at least 35 amino acid residues long. In some embodiments, a peptide is at least 40 amino acid residues long. In some embodiments, a peptide is at least 45 amino acid residues long. In some embodiments, a peptide is at least 50 amino acid residues long. In some embodiments, a peptide is at least 55 amino acid residues long. In some embodiments, a peptide is at least 60 amino acid residues long. In some embodiments, a peptide is at least 65 amino acid residues long. In some embodiments, a peptide is at least 70 amino acid residues long. In some embodiments, a peptide is at least 75 amino acid residues long.

[0320] In some embodiments, an amino acid sequence of a peptide as described herein comprises at least 11, at least 12, at least 13, at least 14, at least 15, at least 16, at least 17, at least 18, at least 19, at least 20, at least 21, at least 22, at least 23, at least 24, at least 25, at least 26, at least 27, at least 28, at least 29, at least 30, at least 31, at least 32, at least 33, at least 34, at least 35, at least 36, at least 37, at least 38, at least 39, at least 40, at least 41, at least 42, at least 43, at least 44, at least 45, at least 46, at least 47, at least 48, at least 49, at least 50, at least 51, at least 52, at least 53, at least 54, at least 55, at least 56, at least 57, at least 58 residues, at least 59, at least 60, at least 61, at least 62, at least 63, at least 64, at least 65, at least 66, at least 67, at least 68, at least 69, at least 70, at least 71, at least 72, at least 73, at least 74, at least 75, at least 76, at least 77, at least 78, at least 79, at least 80, or at least 81 amino acid residues.

[0321] In some embodiments of the present disclosure, a three-dimensional or tertiary structure of a peptide is primarily comprised of beta-sheets and/or alpha-helix structures. In some embodiments, designed or engineered peptides (e.g., target-binding peptides, TfR-binding peptides, or selective depletion complexes) of the present disclosure are small, compact peptides or polypeptides stabilized by intra-chain disulfide bonds (e.g., mediated by cysteines) and a hydrophobic core. In some embodiments, engineered peptides have structures comprising helical bundles with at least one disulfide bridge between each of the alpha helices, thereby stabilizing the peptides. In other embodiments, the engineered TfR-binding peptides comprise structures with three alpha helices and three intra-chain disulfide bonds, one between each of the three alpha helices in the bundle of alpha helices.

[0322] At physiologic extracellular pH, peptides as described herein can have an overall molecular net charge, for example, of −5, −4, −3, −2, −1, 0, +1, +2, +3, +4, or +5. When the net charge is zero, the peptide can be uncharged or zwitterionic. In some embodiments, a peptide contains one or more disulfide bonds and has a positive net charge at physiologic extracellular pH where the net charge can be +0.5 or less than +0.5, +1 or less than +1, +1.5 or less than +1.5, +2 or less than +2, +2.5 or less than +2.5, +3 or less than +3, +3.5 or less than +3.5, +4 or less than +4, +4.5 or less than +4.5, +5 or less than +5, +5.5 or less than +5.5, +6 or less than +6, +6.5 or less than +6.5, +7 or less than +7, +7.5 or less than +7.5, +8 or less than +8, +8.5 or less than +8.5, +9 or less than +9.5, +10 or less than +10. In some embodiments, a peptide has a negative net charge at physiologic extracellular pH where the net charge can be −0.5 or less than −0.5, −1 or less than −1, −1.5 or less than −1.5, −2 or less than −2, −2.5 or less than −2.5, −3 or less than −3, −3.5 or less than −3.5, −4 or less than −4, −4.5 or less than −4.5, −5 or less than −5, −5.5 or less than −5.5, −6 or less than −6, −6.5 or less than −6.5, −7 or less than −7, −7.5 or less than −7.5, −8 or less than −8, −8.5 or less than −8.5, −9 or less than −9.5, −10 or less than −10.

[0323] In some embodiments, peptides of the present disclosure can have an isoelectric point (pI) value from 3 and 10. In other embodiments, peptides of the present disclosure can have a pI value from 4.3 and 8.9. In some embodiments, peptides of the present disclosure can have a pI value from 3-4. In some embodiments, peptides of the present disclosure can have a pI value from 3-5. In some embodiments, peptides of the present disclosure can have a pI value from 3-6. In some embodiments, peptides of the present disclosure can have a pI value from 3-7. In some embodiments, peptides of the present disclosure can have a pI value from 3-8. In some embodiments, peptides of the present disclosure can have a pI value from 3-9. In some embodiments, peptides of the present disclosure can have a pI value from 4-5. In some embodiments, peptides of the present disclosure can have a pI value from 4-6. In some embodiments, peptides of the present disclosure can have a pI value from 4-7. In some embodiments, peptides of the present disclosure can have a pI value from 4-8. In some embodiments, peptides of the present disclosure can have a pI value from 4-9. In some embodiments, peptides of the present disclosure can have a pI value from 4-10. In some embodiments, peptides of the present disclosure can have a pI value from 5-6. In some embodiments, peptides of the present disclosure can have a pI value from 5-7. In some embodiments, peptides of the present disclosure can have a pI value from 5-8. In some embodiments, peptides of the present disclosure can have a pI value from 5-9. In some embodiments, peptides of the present disclosure can have a pI value from 5-10. In some embodiments, peptides of the present disclosure can have a pI value from 6-7. In some embodiments, peptides of the present disclosure can have a pI value from 6-8. In some embodiments, peptides of the present disclosure can have a pI value from 6-9. In some embodiments, peptides of the present disclosure can have a pI value from 6-10. In some embodiments, peptides of the present disclosure can have a pI value from 7-8. In some embodiments, peptides of the present disclosure can have a pI value from 7-9. In some embodiments, peptides of the present disclosure can have a pI value from 7-10. In some embodiments, peptides of the present disclosure can have a pI value from 8-9. In some embodiments, peptides of the present disclosure can have a pI value from 8-10. In some embodiments, peptides of the present disclosure can have a pI value from 9-10.

[0324] In some cases, the engineering of one or more mutations within a peptide of the present disclosure (e.g., a TfR-binding peptide) yields a peptide with an altered isoelectric point, charge, surface charge, or rheology at physiologic extracellular pH. Such engineering of a mutation to a peptide that can be derived from a scorpion or spider complex can change the net charge of the peptide, for example, by decreasing the net charge by 1, 2, 3, 4, or 5, or by increasing the net charge by 1, 2, 3, 4, or 5. In such cases, the engineered mutation can facilitate the ability of the peptide to bind a target protein, promote transcytosis, and penetrate a cell, an endosome, or the nucleus. Suitable amino acid modifications for improving the rheology and potency of a peptide can include conservative or non-conservative mutations.

[0325] A peptide can comprise at most 1 amino acid mutation, at most 2 amino acid mutations, at most 3 amino acid mutations, at most 4 amino acid mutations, at most 5 amino acid mutations, at most 6 amino acid mutations, at most 7 amino acid mutations, at most 8 amino acid mutations, at most 9 amino acid mutations, at most 10 amino acid mutations, or another suitable number as compared to the sequence of the venom or toxin component that the peptide is derived from. In other embodiments, a peptide, or a functional fragment thereof, comprises at least 1 amino acid mutation, at least 2 amino acid mutations, at least 3 amino acid mutations, at least 4 amino acid mutations, at least 5 amino acid mutations, at least 6 amino acid mutations, at least 7 amino acid mutations, at least 8 amino acid mutations, at least 9 amino acid mutations, at least 10 amino acid mutations, or another suitable number as compared to the sequence of the venom or toxin component that the peptide is derived from. In some embodiments, mutations can be engineered within a peptide to provide a peptide that has a desired charge or stability at physiologic extracellular pH.

[0326] Generally, the nuclear magnetic resonance (NMR) solution structures, the X-ray crystal structures, as well as the primary structure sequence alignment of related structural peptide or protein homologs or in silico design can be used to generate mutational strategies that can improve the folding, stability, and/or manufacturability, while maintaining a particular biological function (e.g., TfR affinity/binding). A general strategy for producing homologs or in silico designed peptides or polypeptides can include identification of a charged surface patch or conserved residues of a protein, mutation of critical amino acid positions and loops, followed by in vitro and in vivo testing of the peptides. The overall peptide optimization process can be of iterative nature to the extent that, for example, information obtained during in vitro or in vivo testing is used for the design of the next generation of peptides. Hence, the herein disclosed methods can be used to design peptides with improved properties or to correct deleterious mutations that complicate folding and manufacturability. Key amino acid positions and loops can be retained while other residues in the peptide sequences can be mutated to improve, change, remove, or otherwise modify function, such as binding, transcytosis, or the ability to penetrate a cell, endosome, or nucleus in a cell, homing, or another activity of the peptide. These techniques can be used to predict the 3D pharmacophore of a group of structurally homologous scaffolds, as wells as to predict possible graft regions of related proteins to create chimeras with improved properties (e.g., binding properties). For example, this strategy is used to identify critical amino acid positions and loops that are used to design peptides with improved TfR receptor binding and transcytosis properties, high expression, high stability in vivo, or any combination of these properties.

[0327] The present disclosure also encompasses multimers of the various peptides described herein. Examples of multimers include dimers, trimers, tetramers, pentamers, hexamers, heptamers, and so on. A multimer can be a homomer formed from a plurality of identical subunits or a heteromer formed from a plurality of different subunits. In some embodiments, a peptide of the present disclosure is arranged in a multimeric structure with at least one other peptide, or two, three, four, five, six, seven, eight, nine, ten, or more other peptides. In certain embodiments, the peptides of a multimeric structure each have the same sequence. In other embodiments, one or more or all of the peptides of a multimeric structure have different sequences.

[0328] In some embodiments, the present disclosure provides peptide scaffolds that can be used as a starting point for generating additional, next-generation peptides with more specific or improved properties. In some embodiments, these scaffolds are derived from a variety of CDPs or knotted peptides. Some suitable peptides for scaffolds can include, but are not limited to, chlorotoxin, brazzein, circulin, stecrisp, hanatoxin, midkine, hefutoxin, potato carboxypeptidase inhibitor, bubble protein, attractin, α-GI, α-GID, μ-PIIIA, ω-MVIIA, ω-CVID, χ-MrIA, ρ-TIA, conantokin G, contulakin G, GsMTx4, margatoxin, shK, toxin K, chymotrypsin inhibitor (CTI), and EGF epiregulin core. In some embodiments, the peptide sequence is flanked by additional amino acids. One or more additional amino acids can confer a desired in vivo charge, isoelectric point, chemical conjugation site, stability, or physiologic property to a peptide.

### Pharmacokinetics of Peptides

[0329] The pharmacokinetics of any of the peptides of the present disclosure can be determined after administration of the peptide via different routes of administration. For example, the pharmacokinetic parameters of a peptide of this disclosure can be quantified after intravenous, subcutaneous, intramuscular, rectal, aerosol, parenteral, ophthalmic, pulmonary, transdermal, vaginal, optic, nasal, oral, sublingual, inhalation, dermal, intrathecal, intranasal, peritoneal, buccal, synovial, intratumoral, or topical administration. Peptides of the present disclosure can be analyzed by using tracking agents such as radiolabels or fluorophores. For example, radiolabeled peptides of this disclosure can be administered via various routes of administration. Peptide concentration or dose recovery in various biological samples such as plasma, urine, feces, any organ, skin, muscle, and other tissues can be determined using a range of methods including HPLC, fluorescence detection techniques (TECAN quantification, flow cytometry, iVIS), or liquid scintillation counting.

[0330] The methods and compositions described herein relate to pharmacokinetics of peptide administration via any route to a subject. Pharmacokinetics can be described using methods and models, for example, compartmental models or non-compartmental methods. Compartmental models include but are not limited to monocompartmental model, the two compartmental model, the multicompartmental model or the like. Models are often divided into different compartments and can be described by the corresponding scheme. For example, one scheme is the absorption, distribution, metabolism and excretion (ADME) scheme. For another example, another scheme is the liberation, absorption, distribution, metabolism and excretion (LADME) scheme. In some aspects, metabolism and excretion can be grouped into one compartment referred to as the elimination compartment. For example, liberation includes liberation of the active portion of the composition from the delivery system, absorption includes absorption of the active portion of the composition by the subject, distribution includes distribution of the composition through the blood plasma and to different tissues, metabolism, which includes metabolism or inactivation of the composition and finally excretion, which includes excretion or elimination of the composition or the products of metabolism of the composition. Compositions administered intravenously to a subject can be subject to multiphasic pharmacokinetic profiles, which can include but are not limited to aspects of tissue distribution and metabolism/excretion. As such, the decrease in plasma or serum concentration of the composition is often biphasic, including, for example an alpha phase and a beta phase, occasionally a gamma, delta or other phase is observed.

[0331] Pharmacokinetics includes determining at least one parameter associated with administration of a peptide to a subject. In some aspects, parameters include at least the dose (D), dosing interval (τ), area under curve (AUC), maximum concentration (Cₘₐₓ), minimum concentration reached before a subsequent dose is administered (Cₘᵢₙ), minimum time (Tₘᵢₙ), maximum time to reach Cₘₐₓ (Tₘₐₓ), volume of distribution (V_{d}), steady-state volume of distribution (Vₛₛ), back-extrapolated concentration at time 0 (C₀), steady state concentration (Cₛₛ), elimination rate constant (kₑ), infusion rate (kᵢₙ), clearance (CL), bioavailability (f), fluctuation (% PTF) and elimination half-life (t_{1/2}).

[0332] In certain embodiments, the peptides or peptide complexes of any of SEQ ID NO: 96, SEQ ID NO: 65-SEQ ID NO: 95, SEQ ID NO: 97-SEQ ID NO: 128, SEQ ID NO: 220-SEQ ID NO: 222, or SEQ ID NO: 1-SEQ ID NO: 64 exhibit optimal pharmacokinetic parameters after oral administration. In other embodiments, the peptides or peptide complexes of any of SEQ ID NO: 96, SEQ ID NO: 65-SEQ ID NO: 95, SEQ ID NO: 97-SEQ ID NO: 128, SEQ ID NO: 220-SEQ ID NO: 222, or SEQ ID NO: 1-SEQ ID NO: 64 exhibit optimal pharmacokinetic parameters after any route of administration, such as oral administration, inhalation, intranasal administration, topical administration, intravenous administration, subcutaneous administration, intra-articular administration, intramuscular administration, intraperitoneal administration, intra-synovial, or any combination thereof.

[0333] In some embodiments, any peptide or peptide complex of SEQ ID NO: 96, SEQ ID NO: 65-SEQ ID NO: 95, SEQ ID NO: 97-SEQ ID NO: 128, SEQ ID NO: 220-SEQ ID NO: 222, or SEQ ID NO: 1-SEQ ID NO: 64 exhibits an average Tₘₐₓ of 0.5-12 hours, or 1-48 hours at which the Cₘₐₓ is reached, an average bioavailability in serum of 0.1%-10% in the subject after administering the peptide to the subject by an oral route, an average bioavailability in serum of less than 0.1% after oral administration to a subject for delivery to the GI tract, an average bioavailability in serum of 10-100% after parenteral administration, an average t_{1/2} of 0.1 hours-168 hours, or 0.25 hours-48 hours in a subject after administering the peptide to the subject, an average clearance (CL) of 0.5-100 L/hour or 0.5-50 L/hour of the peptide after administering the peptide to a subject, an average volume of distribution (V_{d}) of 200-20,000 mL in the subject after systemically administering the peptide to the subject, or optionally no systemic uptake, any combination thereof.

### Peptide Stability

[0334] A peptide of the present disclosure can be stable in various biological or physiological conditions, such as physiologic extracellular pH, endosomal or lysosomal pH, or reducing environments inside a cell, in the cytosol, in a cell nucleus, or endosome or a tumor. For example, any peptide or peptide complex comprising any of SEQ ID NO: 96, SEQ ID NO: 65-SEQ ID NO: 95, SEQ ID NO: 97-SEQ ID NO: 128, SEQ ID NO: 220-SEQ ID NO: 222, or SEQ ID NO: 1-SEQ ID NO: 64 can exhibit resistance to reducing agents, proteases, oxidative conditions, or acidic conditions.

[0335] In some cases, biologic molecules (such as peptides and proteins) can provide therapeutic functions, but such therapeutic functions are decreased or impeded by instability caused by the in vivo environment. (Moroz et al. Adv Drug Deliv Rev 101:108-21 (2016), Mitragotri et al. Nat Rev Drug Discov 13(9):655-72 (2014), Bruno et al. Ther Deliv (11):1443-67 (2013), Sinha et al. Crit Rev Ther Drug Carrier Syst. 24(1):63-92 (2007), Hamman et al. BioDrugs 19(3):165-77 (2005)). For instance, the GI tract can contain a region of low pH (e.g. pH˜1), a reducing environment, or a protease-rich environment that can degrade peptides and proteins. Proteolytic activity in other areas of the body, such as the mouth, eye, lung, intranasal cavity, joint, skin, vaginal tract, mucous membranes, and serum, can also be an obstacle to the delivery of functionally active peptides and polypeptides. Additionally, the half-life of peptides in serum can be very short, in part due to proteases, such that the peptide can be degraded too quickly to have a lasting therapeutic effect when administering reasonable dosing regimens. Likewise, proteolytic activity in cellular compartments such as lysosomes and reduction activity in lysosomes and the cytosol can degrade peptides and proteins such that they can be unable to provide a therapeutic function on intracellular targets. Therefore, peptides that are resistant to reducing agents, proteases, and low pH can be able to provide enhanced therapeutic effects or enhance the therapeutic efficacy of co-formulated or conjugated, linked, or fused active agents in vivo.

### Methods of Manufacture

[0336] Various expression vector/host systems can be utilized for the recombinant expression of peptides described herein. Non-limiting examples of such systems include microorganisms such as bacteria transformed with recombinant bacteriophage DNA, plasmid DNA or cosmid DNA expression vectors containing a nucleic acid sequence encoding peptides, peptide complexes, or peptide fusion proteins/chimeric proteins described herein, yeast transformed with recombinant yeast expression vectors containing the aforementioned nucleic acid sequence, insect cell systems infected with recombinant virus expression vectors (e.g., baculovirus) containing the aforementioned nucleic acid sequence, plant cell systems infected with recombinant virus expression vectors (e.g., cauliflower mosaic virus (CaMV), tobacco mosaic virus (TMV)), or transformed with recombinant plasmid expression vectors (e.g., Ti plasmid) containing the aforementioned nucleic acid sequence, or animal cell systems infected with recombinant virus expression vectors (e.g., adenovirus, vaccinia virus, lentivirus) including cell lines engineered to contain multiple copies of the aforementioned nucleic acid sequence, either stably amplified (e.g., CHO/dhfr, CHO/glutamine synthetase) or unstably amplified in double-minute chromosomes (e.g., murine cell lines). Disulfide bond formation and folding of the peptide could occur during expression or after expression or both.

[0337] A host cell can be adapted to express one or more peptides described herein. The host cells can be prokaryotic, eukaryotic, or insect cells. In some cases, host cells are capable of modulating the expression of the inserted sequences or modifying and processing the gene or protein product in the specific fashion desired. For example, expression from certain promoters can be elevated in the presence of certain inducers (e.g., zinc and cadmium ions for metallothionine promoters). In some cases, modifications (e.g., phosphorylation) and processing (e.g., cleavage) of peptide products can be important for the function of the peptide. Host cells can have characteristic and specific mechanisms for the post-translational processing and modification of a peptide. In some cases, the host cells used to express the peptides secrete minimal amounts of proteolytic enzymes.

[0338] The selective depletion complexes of this disclosure can be advantageously made by a single recombinant expression system, with no need for chemical synthesis or modifications. For example, a selective depletion complex can be expressed in CHO cells, yeast, pichia, E. coli, or other organisms.

[0339] In the case of cell- or viral-based samples, organisms can be treated prior to purification to preserve and/or release a target polypeptide. In some embodiments, the cells are fixed using a fixing agent. In some embodiments, the cells are lysed. The cellular material can be treated in a manner that does not disrupt a significant proportion of cells, but which removes proteins from the surface of the cellular material, and/or from the interstices between cells. For example, cellular material can be soaked in a liquid buffer, or, in the case of plant material, can be subjected to a vacuum, in order to remove proteins located in the intercellular spaces and/or in the plant cell wall. If the cellular material is a microorganism, proteins can be extracted from the microorganism culture medium. Alternatively, the peptides can be packed in inclusion bodies. The inclusion bodies can further be separated from the cellular components in the medium. In some embodiments, the cells are not disrupted. A cellular or viral peptide that is presented by a cell or virus can be used for the attachment and/or purification of intact cells or viral particles. In addition to recombinant systems, peptides can also be synthesized in a cell-free system prior to extraction using a variety of known techniques employed in protein and peptide synthesis.

[0340] In some cases, a host cell produces a peptide that has an attachment point for a cargo molecule (e.g., a therapeutic agent). An attachment point could comprise a lysine residue, an N-terminus, a cysteine residue, a cysteine disulfide bond, a glutamic acid or aspartic acid residue, a C-terminus, or a non-natural amino acid. The peptide could also be produced synthetically, such as by solid-phase peptide synthesis, or solution-phase peptide synthesis. Peptide synthesis can be performed by fluorenylmethyloxycarbonyl (Fmoc) chemistry or by butyloxycarbonyl (Boc) chemistry. The peptide could be folded (formation of disulfide bonds) during synthesis or after synthesis or both. Peptide fragments could be produced synthetically or recombinantly. Peptide fragments can be then be joined together enzymatically or synthetically.

[0341] In other aspects, the peptides of the present disclosure can be prepared by conventional solid phase chemical synthesis techniques, for example according to the Fmoc solid phase peptide synthesis method (“Fmoc solid phase peptide synthesis, a practical approach,” edited by W. C. Chan and P. D. White, Oxford University Press, 2000).

[0342] In some embodiments, the peptides of this disclosure can be more stable during manufacturing. For example, peptides of this disclosure can be more stable during recombinant expression and purification, resulting in lower rates of degradation by proteases that are present in the manufacturing process, a higher purity of peptide, a higher yield of peptide, or any combination thereof. In some embodiments, the peptides can also be more stable to degradation at high temperatures and low temperatures during manufacturing, storage, and distribution. For example, in some embodiments peptides of this disclosure can be stable at 25° C. In other embodiments, peptides of this disclosure can be stable at 70° C. or higher than 70° C. In some embodiments, peptides of this disclosure can be stable at 100° C. or higher than 100° C.

### Pharmaceutical Compositions

[0343] A pharmaceutical composition of the disclosure can be a combination of any peptide as described herein with other chemical components, such as carriers, stabilizers, diluents, dispersing agents, suspending agents, thickening agents, antioxidants, solubilizers, buffers, osmolytes, salts, surfactants, amino acids, encapsulating agents, bulking agents, cryoprotectants, and/or excipients. The pharmaceutical composition facilitates administration of a peptide described herein to an organism. In some cases, the pharmaceutical composition comprises factors that extend half-life of the peptide and/or help the peptide to penetrate the target cells. In some embodiments, a pharmaceutical composition comprises a cell modified to express and secrete a selective depletion complex of the present disclosure.

[0344] Pharmaceutical compositions can be administered in therapeutically-effective amounts as pharmaceutical compositions by various forms and routes including, for example, intravenous, subcutaneous, intramuscular, rectal, aerosol, parenteral, ophthalmic, pulmonary, transdermal, vaginal, optic, nasal, oral, sublingual, inhalation, dermal, intrathecal, intratumoral, intranasal, and topical administration. A pharmaceutical composition can be administered in a local or systemic manner, for example, via injection of the peptide described herein directly into an organ, optionally in a depot.

[0345] Parenteral injections can be formulated for bolus injection, infusion, or continuous infusion. The pharmaceutical compositions can be in a form suitable for parenteral injection as a sterile suspension, solution or emulsion in oily or aqueous vehicles, and can contain formulatory agents such as suspending, stabilizing and/or dispersing agents. Pharmaceutical formulations for parenteral administration include aqueous solutions of a peptide described herein in water-soluble form. Suspensions of peptide-antibody complexes described herein can be prepared as oily injection suspensions. Suitable lipophilic solvents or vehicles include fatty oils such as sesame oil, or synthetic fatty acid esters, such as ethyl oleate or triglycerides, or liposomes. Aqueous injection suspensions can contain substances which increase the viscosity of the suspension, such as sodium carboxymethyl cellulose, sorbitol, or dextran. The suspension can also contain suitable stabilizers or agents which increase the solubility and/or reduce the aggregation of such peptide-antibody complexes described herein to allow for the preparation of highly concentrated solutions.

[0346] Alternatively, the peptide described herein can be lyophilized or in powder form for re-constitution with a suitable vehicle, e.g., sterile pyrogen-free water, before use. In some embodiments, a purified peptide is administered intravenously. A peptide described herein can be administered to a subject in order to home, target, migrate to, or be directed to a CNS cell, a brain cell, a cancerous cell, or a tumor. In some embodiments, a peptide can be conjugated to, linked to, or fused to another peptide that provides a targeting function to a specific target cell type in the central nervous system or across the blood brain barrier. Exemplary target cells include a CNS cell, erythrocyte, an erythrocyte precursor cell, an immune cell, a stem cell, a muscle cell, a brain cell, a thyroid cell, a parathyroid cell, an adrenal gland cell, a bone marrow cell, an appendix cell, a lymph node cell, a tonsil cell, a spleen cell, a muscle cell, a liver cell, a gallbladder cell, a pancreas cell, a cell of the gastrointestinal tract, a glandular cell, a kidney cell, a urinary bladder cell, an endothelial cell, an epithelial cell, a choroid plexus epithelial cell, a neuron, a glial cell, an astrocyte, or a cell associated with a nervous system.

[0347] A peptide of the disclosure can be applied directly to an organ, or an organ tissue or cells, such as brain or brain tissue or cells, during a surgical procedure. The recombinant peptide described herein can be administered topically and can be formulated into a variety of topically administrable compositions, such as solutions, suspensions, lotions, gels, pastes, medicated sticks, balms, creams, and ointments. Such pharmaceutical compositions can contain solubilizers, stabilizers, tonicity enhancing agents, buffers, and preservatives.

[0348] In practicing the methods of treatment or use provided herein, therapeutically effective amounts of a peptide described herein can be administered in pharmaceutical compositions to a subject suffering from a condition that affects the immune system. In some embodiments, the subject is a mammal such as a human or a primate. A therapeutically effective amount can vary widely depending on the severity of the disease, the age and relative health of the subject, the potency of the compounds used, and other factors.

[0349] In some embodiments, a peptide is cloned into a viral or non-viral expression vector. Such expression vector can be packaged in a viral particle, a virion, or a non-viral carrier or delivery mechanism, which is administered to patients in the form of gene therapy. In other embodiments, patient cells are extracted and modified to express a peptide capable of binding TfR ex vivo before the modified cells are returned back to the patient in the form of a cell-based therapy, such that the modified cells will express the peptide once transplanted back in the patient.

[0350] Pharmaceutical compositions can be formulated using one or more physiologically acceptable carriers comprising excipients and auxiliaries, which facilitate processing of the active compounds into preparations that can be used pharmaceutically. Formulation can be modified depending upon the route of administration chosen. Pharmaceutical compositions comprising a peptide described herein can be manufactured, for example, by expressing the peptide in a recombinant system, purifying the peptide, lyophilizing the peptide, mixing, dissolving, granulating, dragee-making, levigating, emulsifying, encapsulating, entrapping, or compression processes. The pharmaceutical compositions can include at least one pharmaceutically acceptable carrier, diluent, or excipient and compounds described herein as free-base or pharmaceutically acceptable salt form.

[0351] Methods for the preparation of peptide described herein comprising the compounds described herein include formulating peptide described herein with one or more inert, pharmaceutically acceptable excipients or carriers to form a solid, semi-solid, or liquid composition. Solid compositions include, for example, powders, tablets, dispersible granules, capsules, cachets, and suppositories. These compositions can also contain minor amounts of nontoxic, auxiliary substances, such as wetting or emulsifying agents, pH buffering agents, and other pharmaceutically acceptable additives.

[0352] Non-limiting examples of pharmaceutically-acceptable excipients can be found, for example, in Remington: The Science and Practice of Pharmacy, Nineteenth Ed (Easton, Pa.: Mack Publishing Company, 1995); Hoover, John E., Remington's Pharmaceutical Sciences, Mack Publishing Co., Easton, Pennsylvania 1975; Liberman, H. A. and Lachman, L., Eds., Pharmaceutical Dosage Forms, Marcel Decker, New York, N.Y., 1980; and Pharmaceutical Dosage Forms and Drug Delivery Systems, Seventh Ed. (Lippincott Williams & Wilkins 1999), each of which is incorporated by reference in its entirety.

[0353] Pharmaceutical compositions can also include permeation or absorption enhancers (Aungst et al. AAPS J. 14(1):10-8. (2012) and Moroz et al. Adv Drug Deliv Rev 101:108-21. (2016)). Permeation enhancers can facilitate uptake of molecules from the GI tract into systemic circulation. Permeation enhancers can include salts of medium chain fatty acids, sodium caprate, sodium caprylate, N-(8-[2-hydroxybenzoyl]amino)caprylic acid (SNAC), N-(5-chlorosalicyloyl)-8-aminocaprylic acid (5-CNAC), hydrophilic aromatic alcohols such as phenoxyethanol, benzyl alcohol, and phenyl alcohol, chitosan, alkyl glycosides, dodecyl-2-N,N-dimethylamino propionate (DDAIPP), chelators of divalent cations including EDTA, EGTA, and citric acid, sodium alkyl sulfate, sodium salicylate, lecithin-based, or bile salt-derived agents such as deoxycholates.

[0354] Compositions can also include protease inhibitors including soybean trypsin inhibitor, aprotinin, sodium glycocholate, camostat mesilate, vacitracin, or cyclopentadecalactone.

### Use of Peptides in Treatments

[0355] In some embodiments, a method of treating a subject using the selective depletion complexes of the present disclosure includes administering an effective amount of a peptide as described herein to a subject in need thereof.

[0356] In some embodiments, a method of treating a subject using the selective depletion complexes of the present disclosure includes modifying a cell of a subject to express and secrete a selective depletion complex of the present disclosure. In some embodiments, the cell is a cell in the subject. In some embodiments, the cell is a cell that has been removed from the subject and is re-introduced following modification. In some embodiments, the cell is modified using a viral vector (e.g., an oncolytic herpes simplex virus). In some embodiments, a gene encoding expression and secretion of a selective depletion complex is engineered into a CAR-T cell or other cellular therapy.

[0357] TfR can be expressed in various tissues such as the brain, the stomach, the liver, of the gall bladder. Hence, the peptides of the present disclosure (e.g., a selective depletion complex comprising a TfR-binding peptide) can be used in the diagnosis and treatment of disease and conditions associated with various tissues and organs. For example, drug delivery to these tissues and organs can be improved by using the herein described peptides and peptide complexes carrying a diagnostic and/or therapeutic payload.

[0358] The term “effective amount,” as used herein, refers to a sufficient amount of an agent or a compound being administered which will relieve to some extent one or more of the symptoms of the disease or condition being treated. The result can be reduction and/or alleviation of the signs, symptoms, or causes of a disease, or any other desired alteration of a biological system. Compositions containing such agents or compounds can be administered for prophylactic, enhancing, and/or therapeutic treatments. An appropriate “effective” amount in any individual case can be determined using techniques, such as a dose escalation study.

[0359] The methods, compositions, and kits of this disclosure can comprise a method to prevent, treat, arrest, reverse, or ameliorate the symptoms of a condition. The treatment can comprise treating a subject (e.g., an individual, a domestic animal, a wild animal, or a lab animal afflicted with a disease or condition) with a peptide of the disclosure. The disease can be a cancer or tumor. In treating the disease, the peptide can contact the tumor or cancerous cells. The subject can be a human. Subjects can be humans; non-human primates such as chimpanzees, and other apes and monkey species; farm animals such as cattle, horses, sheep, goats, swine; domestic animals such as rabbits, dogs, and cats; laboratory animals including rodents, such as rats, mice and guinea pigs, and the like. A subject can be of any age. Subjects can be, for example, elderly adults, adults, adolescents, pre-adolescents, children, toddlers, infants, and fetuses in utero.

[0360] Treatment can be provided to the subject before clinical onset of disease. Treatment can be provided to the subject after clinical onset of disease. Treatment can be provided to the subject after 1 day, 1 week, 6 months, 12 months, or 2 years or more after clinical onset of the disease. Treatment can be provided to the subject for more than 1 day, 1 week, 1 month, 6 months, 12 months, 2 years or more after clinical onset of disease. Treatment can be provided to the subject for less than 1 day, 1 week, 1 month, 6 months, 12 months, or 2 years after clinical onset of the disease. Treatment can also include treating a human in a clinical trial. A treatment can comprise administering to a subject a pharmaceutical composition, such as one or more of the pharmaceutical compositions described throughout the disclosure. A treatment can comprise a once daily dosing. A treatment can comprise delivering a peptide of the disclosure to a subject, either intravenously, subcutaneously, intramuscularly, by inhalation, dermally, topically, by intra-articular injection, orally, sublingually, intrathecally, transdermally, intranasally, via a peritoneal route, directly into a tumor e.g., injection directly into a tumor, directly into the brain, e.g., via and intracerebral ventricle route, or directly onto a joint, e.g. via topical, intra-articular injection route. A treatment can comprise administering a peptide-active agent complex to a subject, either intravenously, subcutaneously, intramuscularly, by inhalation, by intra-articular injection, dermally, topically, orally, intrathecally, transdermally, intransally, parenterally, orally, via a peritoneal route, nasally, sublingually, or directly onto cancerous tissues.

### Peptide Kits

[0361] In one aspect, peptides described herein can be provided as a kit. In another embodiment, peptide complexes described herein can be provided as a kit. In another embodiment, a kit comprises amino acids encoding a peptide described herein, a vector, a host organism, and an instruction manual. In some embodiments, a kit includes written instructions on the use or administration of the peptides.

[0362] Additional aspects and advantages of the present disclosure will become apparent to those skilled in this art from the following detailed description, wherein illustrative embodiments of the present disclosure are shown and described. As will be realized, the present disclosure is capable of other and different embodiments, and its several details are capable of modifications in various respects, all without departing from the disclosure. Accordingly, the drawings and description are to be regarded as illustrative in nature, and not as restrictive.

### EXAMPLES

[0363] The following examples are included to further describe some aspects of the present disclosure and should not be used to limit the scope of the invention.

### Example 1

### Manufacture of Peptides

[0364] This example describes the manufacture of the peptides and peptide complexes described herein (e.g., any one of SEQ ID NO: 96, SEQ ID NO: 65-SEQ ID NO: 95, SEQ ID NO: 97-SEQ ID NO: 128, SEQ ID NO: 220-SEQ ID NO: 222, or SEQ ID NO: 1-SEQ ID NO: 64). Peptides derived from proteins were generated in mammalian cell culture using a published methodology. (A. D. Bandaranayke, C. Correnti, B. Y. Ryu, M. Brault, R. K. Strong, D. Rawlings. 2011. Daedalus: a robust, turnkey platform for rapid production of decigram quantities of active recombinant proteins in human cell lines using novel lentiviral vectors. Nucleic Acids Research. (39)21, e143).

[0365] The peptide sequence was reverse-translated into DNA, synthesized, and cloned in-frame with siderocalin using standard molecular biology techniques (M. R. Green, Joseph Sambrook. Molecular Cloning. 2012 Cold Spring Harbor Press). The resulting complex was packaged into a lentivirus, transduced into HEK-293 cells, expanded, isolated by immobilized metal affinity chromatography (IMAC), cleaved with tobacco etch virus (TEV) protease, and purified to homogeneity by reverse-phase chromatography. Following purification, each peptide was lyophilized and stored frozen.

### Example 2

### Peptide Expression Using a Mammalian Expression System

[0366] This example describes expression of the peptides and peptide complexes using a mammalian expression system. Peptides were expressed according to the methods described in in Bandaranayake et al., Nucleic Acids Res. 2011 November; 39(21): e143. Peptides (e.g., any one of SEQ ID NO: 96, SEQ ID NO: 65-SEQ ID NO: 95, SEQ ID NO: 97-SEQ ID NO: 128, SEQ ID NO: 220-SEQ ID NO: 222, or SEQ ID NO: 1-SEQ ID NO: 64) were cleaved from siderocalin using tobacco etch virus protease and were purified by reversed-phase HPLC (RP-HPLC) in a gradient of acetonitrile and water with 0.1% TFA, and then aliquoted and lyophilized for later use. Molecular weight was verified by mass spectrometry.

[0367] To optimize and validate the screening methodology and to identify TfR-binding peptides, transferrin receptor (TfR) ectodomain (“soluble TfR”, SEQ ID NO: 188, MRLAVGALLVCAVLGLCLADYKDEHHHHHHHGLNDIFEAQKIEWHEGGGSKTVRWCA VSEHEATKCQSFRDHMKSVIPSDGPSVACVKKASYLDCIRAIAANEADAVTLDAGLVY DAYLAPNNLKPVVAEFYGSKEDPQTFYYAVAVVKKDSGFQMNQLRGKKSCHTGLGRS AGWNIPIGLLYCDLPEPRKPLEKAVANFFSGSCAPCADGTDFPQLCQLCPGCGCSTLNQ YFGYSGAFKCLKDGAGDVAFVKHSTIFENLANKADRDQYELLCLDNTRKPVDEYKDC HLAQVPSHTVVARSMGGKEDLIWELLNQAQEHFGKDKSKEFQLFSSPHGKDLLFKDSA HGFLKVPPRMDAKMYLGYEYVTAIRNLREGTCPEAPTDECKPVKWCALSHHERLKCD EWSVNSVGKIECVSAETTEDCIAKIMNGEADAMSLDGGFVYIAGKCGLVPVLAENYDK SDNCEDTPEAGYFAVAVVKKSASDLTWDNLKGKKSCHTAVGRTAGWNIPMGLLYNKI NHCRFDEFFSEGCAPGSKKDSSLCKLCMGSGLNLCEPNNKEGYYGYTGAFRCLVEKGD VAFVKHQTVPQNTGGKNPDPWAKNLNEKDYELLCLDGTRKPVEEYANCHLARAPNH AVVTRKDKEACVHKILRQQQHLFGSDVTDCSGNFCLFRSETKDLLFRDDTVCLAKLHD RNTYEKYLGEEYVKAVGNLRKCSTSSLLEACTFRRP) was cloned into the Daedalus soluble protein production lentivector, and protein was purified from the growth media (a gel of soluble TfR is shown in FIG. 1A). The same strategy was used to produce and purify human apo-transferrin (residues 23-698, SEQ ID NO: 189, KTVRWCAVSEHEATKCQ SFRDHMKSVIPSDGPSVACVKKASYLDCIRAIAANEADAVT LDAGLVYDAYLAPNNLKPVVAEFYGSKEDPQTFYYAVAVVKKDSGFQMNQLRGKKS CHTGLGRSAGWNIPIGLLYCDLPEPRKPLEKAVANFFSGSCAPCADGTDFPQLCQLCPG CGCSTLNQYFGYSGAFKCLKDGAGDVAFVKHSTIFENLANKADRDQYELLCLDNTRKP VDEYKDCHLAQVPSHTVVARSMGGKEDLIWELLNQAQEHFGKDKSKEFQLFSSPHGK DLLFKDSAHGFLKVPPRMDAKMYLGYEYVTAIRNLREGTCPEAPTDECKPVKWCAL SH HERLKCDEWSVNSVGKIECVSAETTEDCIAKIMNGEADAMSLDGGFVYIAGKCGLVPV LAENYNKSDNCEDTPEAGYFAIAVVKKSASDLTWDNLKGKKSCHTAVGRTAGWNIPM GLLYNKINHCRFDEFFSEGCAPGSKKDSSLCKLCMGSGLNLCEPNNKEGYYGYTGAFR CLVEKGDVAFVKHQTVPQNTGGKNPDPWAKNLNEKDYELLCLDGTRKPVEEYANCHL ARAPNHAVVTRKDKEACVHKILRQQQHLFGSNVTDCSGNFCLFRSETKDLLFRDDTVC LAKLHDRNTYEKYLGEEYVKAVGNLRKCSTSSLLEACTFRRP), and some of the material was iron-loaded to produce holo-transferrin. Both apo-transferrin and holo-transferrin were tested for binding to the soluble TfR ectodomain via surface plasmon resonance (FIG. 9A), where only holo-transferrin demonstrated any interaction with the immobilized TfR.

[0368] As further validation that the soluble TfR used in the screen represents the human, endogenous protein structure, interaction with the Machupo virus glycoprotein was tested (referred to as MaCV), which uses TfR to determine tropism and mediate cell entry. For this, MaCV was cloned into a mammalian surface display vector SDGF (FIG. 9B), and transfected suspension 293 Freestyle (293F) cells with SDGF-MaCV or a control protein (SDGF-Elafin, an inhibitor of elastase known to bind some native CDPs). Transfected cells were stained with 200 nM each biotinylated TfR (all TfR used in cell binding assays is biotinylated) and Alexa Fluor 647-labeled streptavidin, and then analyzed by flow cytometry (FIG. 9C). Cells transfected with MaCV were successfully stained with TfR, while SDGF-Elafin cells were not. Meanwhile, SDGF-MaCV cells incubated with 200 nM fluorescent elastase were not stained. This validates that the soluble TfR used in the screen comprises the endogenous protein structure and demonstrates both the specificity of TfR binding to its endogenous ligand, and the utility of SDGF as a means to identify novel TfR binding partners.

### Example 3

### Mammalian Surface Display of TfR-Binding Peptides

[0369] This example describes mammalian surface display of TfR-binding peptides of the present disclosure including SEQ ID NO: 1 (SEQ ID NO: 1 is SEQ ID NO: 65 with an added N-terminal GS), SEQ ID NO: 2 (SEQ ID NO: 2 is SEQ ID NO: 66 with an added N-terminal GS), SEQ ID NO: 30 (SEQ ID NO: 30 is SEQ ID NO: 94 with an added N-terminal GS), and SEQ ID NO: 32 (SEQ ID NO: 32 is SEQ ID NO: 96 with an added N-terminal GS). Screening for TfR-binding peptides was performed by transfecting or transducing mammalian cells to display candidate peptides (FIG. 9B) followed by screening against soluble human transferrin receptor ectodomain (200 nM, FIG. 9C, FIG. 1B-FIG. 1G). Mammalian cells had improved fidelity in folding disulfide crosslinked proteins, making them a suitable cell type for display of the peptides of the present disclosure.

[0370] Mammalian cell surface display screening was carried out as follows. The screening strategy used a surface display GFP FasL (SDGF) vector. In the vector, FasL-TM is the transmembrane domain of the FasL protein. More specifically, the designed peptides were cloned as a pool into SDGF, which were then made into lentivirus. 293F cells were transduced with this library at a multiplicity of infection of ˜1, and after three days of growth, the pool of transduced cells was incubated with Alexa647-labeled TfR. For these experiments, fluorescent labeling was accomplished by co-staining TfR with fluorescent streptavidin or fluorescent anti-His antibodies. Soluble TfR contained both His tag and biotin label. Either Alexa Fluor 647 or iFluor 647 was used for the antibody/streptavidin fluorescence. A percentage of the highest-staining TfR-positive cells, from GFP and TfR double-positive cells, were sorted and expanded. At every expansion, a portion of the cells were collected, and at the end, the enriched peptides were identified by sequencing. Flow cytometry was used to assess gating criteria to identify GFP+ 293F cells expressing proteins on their surface via the SDGF peptide construct. Gating progresses using FSC-H vs SSC-H to gate out debris; FSC-H vs FSC-A to gate out doublets; FSC-H vs Pacific Blue H to gate out DAPI+ dead cells; and an optional FITC-H histogram to identify GFP+ cells. Once gated as such, Alexa Fluor 647 (a co-stain for detecting target binding) was used for sorting and analysis.

[0371] Screening was performed using a combination of magnetic sorting and flow sorting. Magnetic sorting was performed as follows: 2×10⁸ 293F cells were transduced with the SDGF CDP library at an MOI of ˜1 and expanded until 3 days post-transduction. For initial screening, magnetic cell sorting was performed. 1×10⁹ transduced cells were resuspended in a binding buffer containing 200 nM biotinylated TfR, 2 mL anti-biotin MicroBeads (UltraPure, Miltenyi 130-105-637), and 21 mL Flow Buffer (PBS+2 mM EDTA and 0.5% bovine serum albumin) in a final volume of 25 mL. Cells were incubated on ice with agitation (mild inversion every 2-5 min) for 30 mins, and were then diluted 10-fold to 250 mL with Flow Buffer, pelleted (500×g, 5 mins), and resuspended to 40 mL with High BSA Flow Buffer (PBS containing 2 mM EDTA and 3% BSA). Cells were split into four 10 mL aliquots and run through a Miltenyi autoMACS® Pro Separator using the “posseld” protocol and “quick rinses” after each sort. The running and wash buffers were High BSA Flow Buffer and PBS+2 mM EDTA, respectively. Eluted cells were pooled, pelleted, and their CDP sequences PCR amplified (Terra™ PCR Direct Polymerase Mix (Takara 639271) for 16 cycles followed by Phusion). This sub-library was cloned into SDGF as above, made into lentivirus, and transduced into a new batch of 293F cells (1×10⁷ cells, MOI˜1) for flow sorting.

[0372] Flow sorting was performed as follows: Flow sorting took place using 2.4×10⁷ cells stained in 3 mL Flow Buffer with 200 nM TfR, 200 nM streptavidin Alexa Fluor 647 conjugate (ThermoFisher S21374), and 1 μg mL⁻¹ DAPI. Cells were diluted 4-fold to 12 mL with Flow Buffer, pelleted (500×g, 5 mins), and resuspended in 3.6 mL Flow Buffer. Cells were sorted on a FACSAria II System (BD), gating based on FSC-A (medium), SSC-A (medium), DAPI-A (negative), GFP-A (positive), and APC-A (top 7% of GFP+) channels. After each flow sort, cells were cultured in FreeStyle Media starting at 0.5-1 mL in a suspension 24-well plate, shaking at 300 rpm, expanding to a final volume of 30 mL in a 125 mL baffled flask shaken at 125 RPM. At this point, cells were re-sorted as above. After the third flow sort, cells were expanded and frozen in 1.5×10⁶ cell pellets. Pellets were PCR amplified as above (Terra Direct PCR followed by InFusion), CDP inserts were subcloned into SDGF, transformed (Stellar competent cells), and colonies picked for miniprepping and sequencing of the cloned CDPs. Enriched variants were those that appeared in the sequence analysis more than once in ˜100 picked colonies. All site-saturation mutagenesis (SSM) affinity maturation screening was done as above, with the following changes. 1) Staining was sequential; first with TfR, and then with an equimolar amount of dye-labeled streptavidin. 2) TfR/streptavidin concentrations were reduced to 20 nM for the first SSM maturation and to 8 nM for the second SSM maturation screen. After each SSM screen, enriched variants were studied to assemble a compound mutant (peptide of SEQ ID NO: 2 or SEQ ID NO: 32) that showed higher TfR staining than any of the variants containing either 1 or 2 of the individual mutations.

[0373] Flow cytometry plots in FIG. 1B-FIG. 1G illustrate successive enrichment of cells that bind to TfR from pooled, high diversity library. FIG. 1A illustrates a Coomassie stained gel of transferrin receptor (TfR) protein showing successful purification of TfR. FIG. 1B illustrates a flow cytometry plot of cells displaying candidate TfR-binding peptides after one flow sort. Cells were sorted based on ability to bind to TfR labeled with a fluorescent streptavidin. Data points in the upper right region represent cells expressing a candidate peptide, quantified by GFP fluorescence, that bind TfR, quantified by fluorescence of the fluorescent TfR-streptavidin. FIG. 1C illustrates a negative control flow cytometry plot of cells displaying candidate TfR-binding peptides after one flow sort. Cells were sorted based on ability to bind to a control protein labeled with a fluorescent streptavidin. Data points in the upper right region represent cells expressing a candidate peptide, quantified by GFP fluorescence, that bind to the negative control protein, quantified by fluorescence of the fluorescent control protein-streptavidin. FIG. 1D illustrates a flow cytometry plot of cells displaying candidate TfR-binding peptides after a second flow sort, following the first cell sort illustrated in FIG. 1B. Cells were sorted based on ability to bind to TfR labeled with a fluorescent streptavidin. Data points in the upper right region represent cells expressing a candidate peptide, quantified by GFP fluorescence, that bind TfR, quantified by fluorescence of the fluorescent TfR-streptavidin. FIG. 1E illustrates a negative control flow cytometry plot of cells displaying candidate TfR-binding peptides after a second flow sort, following the first cell sort illustrated in FIG. 1C. Cells were sorted based on ability to bind to a control protein labeled with a fluorescent streptavidin. Data points in the upper right region represent cells expressing a candidate peptide, quantified by GFP fluorescence, that bind to the negative control protein, quantified by fluorescence of the fluorescent control protein-streptavidin. FIG. 1F illustrates a flow cytometry plot of cells displaying candidate TfR-binding peptides after a third flow sort, following the second cell sort illustrated in FIG. 1D. Cells were sorted based on ability to bind to TfR labeled with a fluorescent streptavidin. Data points in the upper right region represent cells expressing a candidate peptide, quantified by GFP fluorescence, that bind TfR, quantified by fluorescence of the fluorescent TfR-streptavidin. The box indicates cells expressing peptides that bind to TfR. FIG. 1G illustrates a negative control flow cytometry plot of cells displaying candidate TfR-binding peptides after a third flow sort, following the second cell sort illustrated in FIG. 1E. Cells were sorted based on ability to bind to a control protein labeled with a fluorescent streptavidin. Data points in the upper right region represent cells expressing a candidate peptide, quantified by GFP fluorescence, that bind to the negative control protein, quantified by fluorescence of the fluorescent control protein-streptavidin. The box indicates cells expressing peptides that bind to the negative control protein.

[0374] Each flow sort represents growing the library of cells to >30 million cells, staining for TfR-binding, and flow sorting the top binders. Sorted binders were allowed to grow before the next flow sort was performed.

### Example 4

### Identification of TfR-Binding Peptides

[0375] This example describes identification of TfR-binding peptides using a mammalian surface display system, as described in EXAMPLE 3.

[0376] Using the mammalian surface display system of EXAMPLE 3, a single clonal peptide was identified having a sequence of SEQ ID NO: 1 (SEQ ID NO: 1 is SEQ ID NO: 65 with an added N-terminal GS). A library of oligonucleotides encoding 10,000 CDPs was amplified and mutagenized. The CDPs were 17-50 amino acids in length, with 4, 6, 8, or 10 cysteines. While there was some weighting of the library towards annotated knottins or defensins, the library contained CDPs from every domain/kingdom of life. This library was cloned into SDGF, made into lentivirus, and transduced into suspension 293F cells. The transduced cells were subjected to staining with TfR (200 nM) and co-stain over the course of one round of magnetic cell sorting and three rounds of flow sorting, each round enriching for cells stained with TfR. Binding was validated to specifically bind TfR in the surface display assay using 200 nM of soluble AF647-TfR, which was either biotinylated or attached to a His tag. Staining was carried out using a one-step staining protocol for tetravalent target avidity. A single TfR-binding CDP, designated SEQ ID NO: 1, was identified by DNA sequencing of the final enriched cell population. It represents a randomly mutated variant of cytochrome BC1 complex subunit 6 from the marine choanoflagellate Monosiga brevicolis (Uniprot ID: A9V0D7, DOI: 10.1093/nar/gku989), is 49 amino acids in length (six cysteines) and has a predicted molecular mass of 5.6 kDa. SEQ ID NO: 65 was then subjected to affinity maturation using site saturation mutagenesis (SSM), wherein a library is created containing every possible non-cysteine single amino acid substitution (43 non-Cys amino acids×18 possible non-Cys substitutions=775 variants, including SEQ ID NO: 1).

[0377] Flow cytometry plots in FIG. 2A-FIG. 2D illustrate flow cytometry of cells displaying the single clonal TfR-binding peptide and screened for binding to either TfR or a negative control protein. Flow cytometry of the single TfR-binding peptide was performed to verify that the identified TfR-binding peptide bound specifically TfR and not to the streptavidin label. The control protein used in this experiment has an amino acid sequence set forth in SEQ ID NO: 186 (MRLAVGALLVCAVLGLCLADYKDEHHHHHHGLNDIFEAQKIEWHEGGGSKTVRWCA VSEHEATKCQSFRDHMKSVIPSDGPSVACVKKASYLDCIRAIAANEADAVTLDAGLVY DAYLAPNNLKPVVAEFYGSKEDPQTFYYAVAVVKKDSGFQMNQLRGKKSCHTGLGRS AGWNIPIGLLYCDLPEPRKPLEKAVANFFSGSCAPCADGTDFPQLCQLCPGCGCSTLNQ YFGYSGAFKCLKDGAGDVAFVKHSTIFENLANKADRDQYELLCLDNTRKPVDEYKDC HLAQVPSHTVVARSMGGKEDLIWELLNQAQEHFGKDKSKEFQLFSSPHGKDLLFKDSA HGFLKVPPRMDAKMYLGYEYVTAIRNLREGTCPEAPTDECKPVKWCALSHHERLKCD EWSVNSVGKIECVSAETTEDCIAKIMNGEADAMSLDGGFVYIAGKCGLVPVLAENYDK SDNCEDTPEAGYFAVAVVKKSASDLTWDNLKGKKSCHTAVGRTAGWNIPMGLLYNKI NHCRFDEFFSEGCAPGSKKDSSLCKLCMGSGLNLCEPNNKEGYYGYTGAFRCLVEKGD VAFVKHQTVPQNTGGKNPDPWAKNLNEKDYELLCLDGTRKPVEEYANCHLARAPNH AVVTRKDKEACVHKILRQQQHLFGSDVTDCSGNFCLFRSETKDLLFRDDTVCLAKLHD RNTYEKYLGEEYVKAVGNLRKCSTSSLLEACTFRRPGSSELYENKPRRPYIL). FIG. 2A illustrates a negative control flow cytometry plot of cells expressing a TfR-binding peptide of SEQ ID NO: 1 (x-axis, GFP) screened for binding to a negative control protein labeled (y-axis, stained with a fluorescent anti-His antibody). FIG. 2B illustrates a flow cytometry plot of cells expressing a peptide of SEQ ID NO: 1 (x-axis, GFP) and TfR (y-axis, stained with a fluorescent anti-His antibody). FIG. 2C illustrates a negative control flow cytometry plot of cells expressing a TfR-binding peptide of SEQ ID NO: 1 (x-axis, GFP) screened for binding to a negative control protein labeled (y-axis, stained with a fluorescent streptavidin). FIG. 2D illustrates a flow cytometry plot of cells expressing a TfR-binding peptide of SEQ ID NO: 1 (x-axis, GFP) screened for binding to TfR (y-axis, stained with a fluorescent streptavidin).

[0378] TfR staining was observed with cells expressing the identified clone, with no staining seen with a control protein. This staining was observed when either fluorescent streptavidin or anti-His antibody was the co-stain, demonstrating that the nature of the binding is dependent only on TfR, not the co-stain. Double-positive cells (upper right quadrant) indicate peptide-expressing cells that are bound to TfR.

[0379] An alternative method was also used to identify and optimize (“mature”) TfR-binding peptides that are second and third generation binders using mammalian display screening. This library was screened with a modified staining protocol, using a lower concentration of target and co-stain (20 nM) and separate staining steps; the latter further increases stringency by eliminating the tetravalent avidity granted by streptavidin. Up to four rounds of flow sorting and enrichment were used to identify variants with improved TfR binding characteristics.

[0380] Permutation of enriched variants identified an optimal mutant (SEQ ID NO: 2 (SEQ ID NO: 2 is SEQ ID NO: 66 with an added N-terminal GS)), and this process was repeated again (8 nM TfR and co-stain; otherwise, identical protocol) to generate SEQ ID NO: 32 (SEQ ID NO: 32 is SEQ ID NO: 96 with an added N-terminal GS). This twice-matured variant contains 14 point mutations from the original library member (GSREGCASHCTKYKAELEKCEARVSSRSNTEETCVQELFDFLHCVDHCVSQ, SEQ ID NO: 191). Four point mutations from the parent sequence are found in SEQ ID NO: 1, while SEQ ID NO: 2 and SEQ ID NO: 32 contain 6 and 4 mutations, respectively, from the previous generation.

[0381] SEQ ID NO: 1 and its variants (e.g., SEQ ID NO: 2 and SEQ ID NO: 32) were produced as soluble peptides and validated by reversed-phase HPLC (RP-HPLC), SDS-PAGE, and mass spectrometry. Based on their masses of ˜5-6 kDa, their slower-than-expected mobility in SDS-PAGE was a demonstration of the interesting electrophoretic mobility characteristics that some CDPs possess. All variants showed markedly different mobility upon DTT reduction (10 mM) in both SDS-PAGE and RP-HPLC, confirming disulfide bond stabilization. Their binding to TfR was verified by surface plasmon resonance (FIG. 4), also confirming increased affinity of matured variants (SEQ ID NO: 32 [K_{D}=216±1 pM]>SEQ ID NO: 2 [K_{D}=8.7±0.4 nM]>SEQ ID NO: 1 [K_{D} not determined but available data is consistent with a K_{D}>10 μM]). All variants demonstrated full or partial resistance to cellular reducing conditions (10 mM glutathione), while the affinity matured variants showed partial resistance to pepsin (though all were vulnerable to trypsin proteolysis). The intact, non-reduced peptide of SEQ ID NO: 32 protein demonstrates substantially improved heat tolerance to that of the DTT-reduced protein, with no substantial change in circular dichroism characteristics until well above common ambient temperatures (>50° C.) and a failure to observe complete unfolding up to 95° C.

### Example 5

### Site Saturation Mutagenesis of Peptides

[0382] This example illustrates site saturation mutagenesis (SSM) of peptides of this disclosure to identify beneficial or deleterious mutations. Site saturation mutagenesis was performed on a peptide of SEQ ID NO: 1 (SEQ ID NO: 1 is SEQ ID NO: 65 with an added N-terminal GS, results in FIG. 3A) and a peptide of SEQ ID NO: 2 (SEQ ID NO: 2 is SEQ ID NO: 66 with an added N-terminal GS, results in FIG. 3B).

[0383] FIG. 3A and FIG. 3B show the TfR-binding capabilities of TfR-binding peptide variants identified during peptide maturation. SSM was employed for affinity maturation of the peptide having a sequence of SEQ ID NO: 1 as identified in the first mammalian surface display experiments (see e.g., FIG. 1B-FIG. 1G and FIG. 2A-FIG. 2D). During each round of maturation, a library of every possible non-cysteine point variants was constructed and screened against TfR at higher stringency than first screen. Variants with improved binding were enriched and identified by Sanger sequencing. Such enriched variant mutations were combined with one another in various permutations (shown in the data) to identify a composite, improved binder. Two rounds of SSM were completed, yielding matured peptides comprising SEQ ID NO: 2, and SEQ ID NO: 32, respectively (SEQ ID NO: 32 is SEQ ID NO: 96 with an added N-terminal GS). TfR concentration in the first round of SSM was 20 nM and SSM was carried out using one-step staining. TfR concentration in the second round of SSM was 8 nM and SSM was carried out using two-step staining.

[0384] TfR-binding of mammalian cells expressing peptides of the SSM library was performed as described in EXAMPLE 3 and EXAMPLE 4, but with a higher stringency protocol. The higher stringency protocol included a lower concentration of TfR (e.g., 20 nM).

[0385] FIG. 3A illustrates the results of a first site-saturation mutagenesis screen in SEQ ID NO: 1 (SEQ ID NO: 1 is SEQ ID NO: 65 with an added N-terminal GS), with some variants exhibiting improved binding activity to TfR such as peptides having a sequence of SEQ ID NO: 4, SEQ ID NO: 5, and SEQ ID NO: 8 (SEQ ID NO: 4, SEQ ID NO: 5, and SEQ ID NO: 8 are SEQ ID NO: 68, SEQ ID NO: 69, and SEQ ID NO: 72, respectively, with an added N-terminal GS). FIG. 3B show TfR-binding of variants identified during the second variant mutation.

[0386] The x-axis shows SEQ ID NOs of all variants and the y-axis shows the amount TfR bound in relative fluorescence units (RFUs) extrapolated from flow cytometry experiments.

### Example 6

### TfR-Binding of SSM-Generated TfR-Binding Peptide Variants

[0387] This example demonstrates TfR-binding of site saturation mutagenesis (SSM)-generated TfR-binding peptide variants, as identified during SSM as described in EXAMPLE 5

[0388] In vivo BBB penetration experiments revealed that the TfR-binding capability of a peptide does not necessarily correspond with the capability of promoting vesicular transcytosis.

[0389] The six cysteines corresponding to residues C6, C10, C20, C34, C44, and C48, with reference to SEQ ID NO: 32 (C4, C8, C18, C32, C42, and C46, with reference to SEQ ID NO: 96), participate in disulfides, and thus contribute to peptide stability.

[0390] The surface interface residues corresponding to residues G5, A7, S8, N14, L17, E18, E21, L38, L42, L45, D46, H47, S50, Q51, with reference to SEQ ID NO: 32 (G3, A5, S6, N12, L15, E16, E19, L36, L40, L43, D44, H45, S48, Q49, with reference to SEQ ID NO: 96), that are present in all three generations of TfR-binding peptides likely contribute to TfR-binding. In some embodiments, the peptide or peptide complex of the present disclosure comprises at least one or more of these corresponding residues in SEQ ID NO: 96, SEQ ID NO: 65-SEQ ID NO: 95, SEQ ID NO: 97-SEQ ID NO: 128, SEQ ID NO: 220-SEQ ID NO: 222, or SEQ ID NO: 1-SEQ ID NO: 64. Such peptides can accordingly be engineered with enhanced binding to TfR.

[0391] Hydrophilic surface-distal residues such as D, E, H, K, R, N, Q, S, or T likely contribute to peptide solubility corresponding to the following amino acid residues R3, E4, R9, K12, D14, E15, K19, R23, S26, S28, N29, T30, E31, E32, D33, E35, Q36, E37, E39, and D40, with reference to SEQ ID NO: 32 (R1, E3, R7, K10, D12, E13, K17, R21, S24, S26, N27, T28, E29, E30, D31, E33, Q34, E35, E37, and D38, with reference to SEQ ID NO: 96). In some embodiments, the peptide or peptide complex of the present disclosure comprises at least one or more of these corresponding residues in SEQ ID NO: 96, SEQ ID NO: 65-SEQ ID NO: 95, SEQ ID NO: 97-SEQ ID NO: 128, SEQ ID NO: 220-SEQ ID NO: 222, or SEQ ID NO: 1-SEQ ID NO: 64. Such peptides can accordingly be engineered with enhanced solubility.

[0392] Higher binding affinity is associated with the presence of hydrophilic residues such as D, E, H, K, R, N, Q, S, or T as shown by improved binding from a mutation away from a nonpolar or hydrophobic residue such as A, M, I, L, V, F, W, or Y at the residues corresponding to D15, E35, E39, and H49, with reference to SEQ ID NO: 32 (D13, E33, E37, and H47, with reference to SEQ ID NO: 96). In some embodiments, the peptide or peptide complex of the present disclosure comprises at least one or more of these corresponding residues in SEQ ID NO: 96, SEQ ID NO: 65-SEQ ID NO: 95, SEQ ID NO: 97-SEQ ID NO: 128, SEQ ID NO: 220-SEQ ID NO: 222, or SEQ ID NO: 1-SEQ ID NO: 64. Such peptides can accordingly be engineered with modified binding affinity.

[0393] Higher binding affinity to TfR is associated with nonpolar or hydrophobic residues such as A, M, I, L, V, F, W, or Y as shown by improved binding from a mutation away from a hydrophilic residue such as D, E, H, K, R, N, Q, S, or T at the amino acid residues corresponding to M11, M25, and M27, with reference to SEQ ID NO: 32 (M9, M23, and M25, with reference to SEQ ID NO: 96). In some embodiments, the peptide or peptide complex of the present disclosure comprises at least one or more of these corresponding residues in SEQ ID NO: 96, SEQ ID NO: 65-SEQ ID NO: 95, SEQ ID NO: 97-SEQ ID NO: 128, SEQ ID NO: 220-SEQ ID NO: 222, or SEQ ID NO: 1-SEQ ID NO: 64. Such peptides can accordingly be engineered with modified binding affinity.

[0394] A higher TfR-binding affinity is associated with aliphatic residues such as A, M, I, L, or V as shown by improved binding from a mutation away from large, aromatic residues such as F, W, or Y at the amino acid residue corresponding to L45 with reference to SEQ ID NO: 32 (L43 with reference to SEQ ID NO: 96). Substitutions of any one or more F, W, or Y in a peptide of the present disclosure to an aliphatic residue comprising A, M, I, L, or V can be used to enhance the binding affinity of the peptide to TfR.

[0395] Any of peptides or peptide complexes of the present disclosure (e.g., any one of SEQ ID NO: 96, SEQ ID NO: 65-SEQ ID NO: 95, SEQ ID NO: 97-SEQ ID NO: 128, SEQ ID NO: 220-SEQ ID NO: 222, or SEQ ID NO: 1-SEQ ID NO: 64) can be modified at one or more of the corresponding residues described herein, to generate peptide variants with improved properties including enhanced stability and increased (or decreased) binding properties or modified TfR-binding affinity and increased (or decreased) transcytosis properties, including modified kₐ (association) and k_{d} (dissociation) rate constants.

[0396] Sequence alignments of certain TfR-binding peptides are shown in TABLE 9. Certain residues involved in the interaction with TfR are shown in bold. Surface interacting residues include but are not limited to those indicated.

TABLE 9
Corresponding Residues in TfR-Binding Peptides

| SEQ ID NO | Sequence |
|---|---|
| SEQ ID NO: 1 | GSREGCASRCTKYNAELEKCEARVSSMSNTEETCVQELFDLLHCVDHCVSQ |
| SEQ ID NO: 2 | GSREGCASRCTKYNAELEKCEARVMSMSNTEEDCEQELEDLLHCLDHCHSQ |
| SEQ ID NO: 30 | GSREGCASRCMKYNAELEKCEARMMSMSNTEEDCEQELEDLLYCLDHCHSQ |
| SEQ ID NO: 32 | GSREGCASRCMKYNDELEKCEARMMSMSNTEEDCEQELEDLLYCLDHCHSQ |
| SEQ ID NO: 65 | REGCASRCTKYNAELEKCEARVSSMSNTEETCVQELFDLLHCVDHCVSQ |
| SEQ ID NO: 66 | REGCASRCTKYNAELEKCEARVMSMSNTEEDCEQELEDLLHCLDHCHSQ |
| SEQ ID NO: 94 | REGCASRCMKYNAELEKCEARMMSMSNTEEDCEQELEDLLYCLDHCHSQ |
| SEQ ID NO: 96 | REGCASRCMKYNDELEKCEARMMSMSNTEEDCEQELEDLLYCLDHCHSQ |
| SEQ ID NO: 33 | GSREGCASRCTRYNAELERCEARVSSMSNTEETCVQELFDLLHCVDHCVSQ |
| SEQ ID NO: 34 | GSREGCASRCTRYNAELERCEARVMSMSNTEEDCEQELEDLLHCLDHCHSQ |
| SEQ ID NO: 62 | GSREGCASRCMRYNAELERCEARMMSMSNTEEDCEQELEDLLYCLDHCHSQ |
| SEQ ID NO: 64 | GSREGCASRCMRYNDELERCEARMMSMSNTEEDCEQELEDLLYCLDHCHSQ |
| SEQ ID NO: 97 | REGCASRCTRYNAELERCEARVSSMSNTEETCVQELFDLLHCVDHCVSQ |
| SEQ ID NO: 98 | REGCASRCTRYNAELERCEARVMSMSNTEEDCEQELEDLLHCLDHCHSQ |
| SEQ ID NO: 126 | REGCASRCMRYNAELERCEARMMSMSNTEEDCEQELEDLLYCLDHCHSQ |
| SEQ ID NO: 128 | REGCASRCMRYNDELERCEARMMSMSNTEEDCEQELEDLLYCLDHCHSQ |

### Example 7

### Surface Plasmon Resonance (SPR) Analysis of Peptide Binding Interactions

[0397] This example illustrates surface plasmon resonance (SPR) analysis of peptide binding interactions with TfR.

[0398] Various peptides of the present disclosure were analyzed for binding affinity to TfR. Briefly, binding affinity was analyzed by SPR experiments using captured biotinylated TfR, and which were performed at 25° C. on a Biacore T100 instrument (GE Healthcare) with Series S SA chips. HBS-EP+ (10 mM HEPES, pH 7.4, 150 mM NaCl, 3 mM EDTA, 0.05% surfactant P20) was used as a running buffer in the experiments with 0.1 mg/mL bovine serum albumin (BSA). Soluble TfR-binding peptides were evaluated for binding by incubation of a dilution series, in which the concentration range was varied depending on the TfR-binding peptide being tested with 2 μg/ml TfR, capturing ˜300 resonance units (RUs) of protein for SPR experiments.

[0399] First, an allelic series of TfR-binding peptides with varying affinities was confirmed by SPR as shown in FIG. 4. Peptides having a sequence of SEQ ID NO: 1, SEQ ID NO: 2, SEQ ID NO: 4, and SEQ ID NO: 32 (SEQ ID NO: 1, SEQ ID NO: 2, SEQ ID NO: 4, and SEQ ID NO: 32 are SEQ ID NO: 65, SEQ ID NO: 66, SEQ ID NO: 68, and SEQ ID NO: 96, respectively, with an added N-terminal GS) were tested at a concentration of 300 nM. Data was normalized to the maximum response of each trace. The results confirmed that peptide variants from later rounds of affinity maturation exhibited different binding affinities for TfR. That is, the peptide from the latest round of affinity maturation having a sequence of SEQ ID NO: 32 showed the highest binding affinity for TfR, whereas SEQ ID NO: 1 showed the lowest binding affinity for human TfR (hTfR).

[0400] Next, the binding of four peptides having a sequence of SEQ ID NO: 2, SEQ ID NO: 4, SEQ ID NO: 30, and SEQ ID NO: 32, respectively, (SEQ ID NO: 2, SEQ ID NO: 4, SEQ ID NO: 30, and SEQ ID NO: 32 are SEQ ID NO: 66, SEQ ID NO: 68, SEQ ID NO: 94, and SEQ ID NO: 96, respectively, with an added N-terminal GS) to captured and biotinylated hTfR was measured. FIG. 5 illustrates a surface plasmon resonance (SPR) trace showing TfR-binding for varying concentrations of the peptide from 100 μM to 200 nM having a sequence of SEQ ID NO: 2. FIG. 6 illustrates a surface plasmon resonance (SPR) trace showing TfR-binding for varying concentrations of the peptide from 100 μM to 200 nM having a sequence of SEQ ID NO: 4. FIG. 7 illustrates binding and single cycle kinetics data of SEQ ID NO: 32 binding to captured biotinylated (Bt) hTfR by SPR. 5 concentrations of a peptide having a sequence of SEQ ID NO: 32 (0.037 nM, 0.11 nM, 0.33 nM, 1 nM, 3 nM) were injected over 2 densities of captured Bt-hTfR and analyzed globally. FIG. 8 illustrates binding and single cycle kinetics data of SEQ ID NO: 30 binding to captured biotinylated hTfR by SPR. 5 concentrations of a peptide having a sequence of SEQ ID NO: 30 (0.037 nM, 0.11 nM, 0.33 nM, 1 nM, 3 nM) were injected over 2 densities of captured Bt-hTfR and analyzed globally.

[0401] The binding SEQ ID NO: 2 and SEQ ID NO: 4 was measured at serial dilutions between 100 μM and 200 nM, while SEQ ID NO: 30 and SEQ ID NO: 32 were tested at serial dilutions of 37 μM to 3 nM, to yield kinetic data. For the peptides of SEQ ID NO: 30 and SEQ ID NO: 32, the kinetic testing was performed by injecting the peptides over two densities (shown in FIG. 7 and FIG. 8) of captured and biotinylated hTfR and data was analyzed globally.

[0402] TABLE 10 below summarizes the data obtained from the analysis of the graphs shown in FIG. 5-FIG. 8. For the peptide having a sequence of SEQ ID NO: 2 a K_{D} of 8.7±4 nM and an Rₘₐₓ of 23.1±2 RUs was determined. For the peptide having a sequence of SEQ ID NO: 4 a K_{D} of 14.8±6 nM and an Rₘₐₓ of 21.2±2 RUs was determined. For the peptide having a sequence of SEQ ID NO: 32 a K_{D} of 216±1 μM was determined. For the peptide having a sequence of SEQ ID NO: 30 a K_{D} of 468±1 μM was determined. Lower K_{D} values indicate a higher binding affinity. Rₘₐₓ represents the maximum binding capacity of the peptide to hTfR. As shown in TABLE 10 below, SEQ ID NO: 32 had the lowest K_{D}, indicating that it displayed the strongest binding to hTfR. An increased TfR-binding affinity can correspond to an improved transcytosis function. In some cases, an increased TfR-binding affinity can correspond to a reduced transcytosis function, wherein in some cases, an increased TfR-binding affinity does not correspond to a change in transcytosis function compared to the reference peptide. Without being bound to any theory, it is assumed that the ratio of Kₐ/K_{d} can affect the transcytosis function of a peptide, and thus modulation of Kₐ and/or K_{d} can be used to generate TfR-binding peptides with optimal TfR binding affinity and transcytosis function.

TABLE 10
SPR Analysis Results

| SEQ ID NO | kₐ (M⁻¹ s⁻¹) | k_{d} (s⁻¹) | K_{D} | | Analysis Method |
|---|---|---|---|---|---|
| SEQ ID NO: 1 | | | + | | |
| SEQ ID NO: 2 | — | — | 8.7(4) | nM | Steady State |
| SEQ ID NO: 4 | — | — | 14.8(6) | nM | Steady State |
| SEQ ID NO: 32 | 8.55(1) × 10⁶ | 1.85(1) × 10⁻³ | 216(1) | pM | Single Cycle |
| | | | | | Kinetics |
| SEQ ID NO: 30 | 8.57(2) × 10⁶ | 4.16(1) × 10⁻³ | 486(1) | pM | Single Cycle |

Kinetics
* reported kₐ is approaching the limits that can be measured by the instrument

### Example 8

### pH-Independent Binding of a Transferrin Receptor-Binding Peptide

[0403] This example describes pH-independent binding of a transferrin receptor-binding peptide. A CDP that binds to transferrin receptor (TfR) and has a sequence of SEQ ID NO: 32 (corresponding to SEQ ID NO: 96 with an added N-terminal GS) was identified using site saturation mutagenesis as described in EXAMPLE 5. The pH-dependence of the binding affinity of the TfR-binding peptide for TfR was then compared at an exemplary extracellular pH of 7.4 and at an exemplary endosomal pH of 5.5.

[0404] Cells expressing the peptide of SEQ ID NO: 32 were stained with 10 nM of biotinylated TfR labeled with streptavidin-AlexaFluor 647. Staining was performed in either a buffer at an exemplary extracellular pH (pH 7.4, FIG. 10A) or in a buffer at an exemplary endosomal pH (pH 5.5, FIG. 10B). TfR fluorescence was measured as a function of expression of SEQ ID NO: 32. A slice gate corresponding to a desired peptide expression level was selected for comparison. The level TfR fluorescence within the selected slice gate was indicative of the affinity of the peptide for TfR at the tested pH. The results showed that the TfR-binding peptide bound to TfR with slightly higher affinity at endosomal pH (pH 5.5) than at physiologic extracellular pH (pH 7.4, FIG. 10C), with a slightly higher affinity at pH 5.5.

[0405] The results show that the TfR binding peptide of SEQ ID NO: 32 can bind TfR at a range of pHs including extracellular and endosomal pHs, and that it has a relatively pH-independent affinity for binding TfR. This demonstrates the suitability of the TfR-binding peptide for use in a method recruiting target molecules to endosomes while remaining bound to TfR inside the endosome. These results suggest that the TfR-binding peptide of SEQ ID NO: 32, and similar TfR binding CDPs of this disclosure, along with peptides linked to the TfR-binding peptide, can be recycled back to the cell surface along with TfR following TfR-mediated endocytosis.

### Example 9

### PD-L1-Binding Peptides for pH-Dependent Endosomal Delivery of PD-L1

[0406] This example describes development and in vitro testing of PD-L1-binding peptides capable of pH-dependent dissociation from PD-L1, for example, at endosomal pH (e.g., pH 5.5).

[0407] Imparting pH-dependent binding to a target-engaging domain (CDP or otherwise) can done in a variety of ways, an example of which is provided here. Here, a library of variants was designed containing histidine substitutions. Histidine residues were introduced because, of all of the natural amino acids, His is the only one with a side chain whose charge changes significantly between neutral (e.g., pH 7.4) and acidic (e.g., pH<6) endosomal conditions. This change of charge can alter binding, either directly (introducing a positive charge at low pH that could result in charge repulsion of nearby cationic groups) or indirectly (the change in charge imparts a subtle change in the binder's structure, disrupting a protein-protein interface) as the pH changes, for example from a physiologic extracellular environment to an endosomal environment as the endosome acidifies. In its simplest form, this could be executed by generating double-His doped libraries, where, for a CDP, every non-Cys, non-His residue could be substituted with a His one- or two-at-a-time. FIG. 11D shows a high-affinity PD-L1-binding CDP sequence (SEQ ID NO: 187, EEDCKVHCVKEWMAGKACAERQKSYTIGRAHCSGQKFDVFKCLDHCAAP) above and to the side of a His substitution matrix. Each black box represents a first and second site in which His could be substituted. Those purely along the top-left to bottom-right diagonal represent single His substitutions. Each black box represents a variant with one or two native-to-His substitutions, representing 821 peptide variants to be screened. A variant library containing the parental sequence and variants with one or two native-to-His substitutions was generated and tested.

[0408] The resulting histidine-enriched PD-L1-binding peptides were evaluated for their PD-L1 binding in comparative binding experiments at various pH levels or ranges. A variant library of PD-L1-binding peptides was expressed via mammalian surface display, with each variant containing zero, one or two His substitutions. These variants were tested for maintenance of binding under extracellular pH (such as pH 7.4), and for reduced binding under endosomal pH (such as pH 5.5). Sequential screening was performed, as shown in FIG. 21. The input library was initially screened for PD-L1 binding at pH 7.4, and strong binders were selected (shaded area). The second and third rounds of screening (“Sort 1” and “Sort 2,” respectively) were performed at pH 5.5 to mimic endosomal pH, and the weak binders were collected (shaded area). The final round of screening (“Sort 3”) was performed at pH 7.4, and strong binders were selected. Differential binding at pH 7.4 and pH 5.5 was observed following screening (“Sort 4”).

[0409] Variants of SEQ ID NO: 187 containing histidine substitutions at one, two, or three of E2H, M13H, and K16H amino acid positions were identified in the pooled screen as pH-dependent binders of PD-L1. pH-dependent binding was validated by measuring PD-L1 binding at pH 7.4 and pH 5.5 to cells surface expressing single variants, as shown in FIG. 22. Peptides containing substitutions at E2H (EHDCKVHCVKEWMAGKACAERQKSYTIGRAHCSGQKFDVFKCLDHCAAP, SEQ ID NO: 234), M13H (EEDCKVHCVKEWHAGKACAERQKSYTIGRAHCSGQKFDVFKCLDHCAAP, SEQ ID NO: 235), K16H (EEDCKVHCVKEWMAGHACAERQKSYTIGRAHCSGQKFDVFKCLDHCAAP, SEQ ID NO: 236), E2H and M13H (EHDCKVHCVKEWHAGKACAERQKSYTIGRAHCSGQKFDVFKCLDHCAAP, SEQ ID NO: 237), E2H and K16H (EHDCKVHCVKEWMAGHACAERQKSYTIGRAHCSGQKFDVFKCLDHCAAP, SEQ ID NO: 233), M13H and K16H (EEDCKVHCVKEWHAGHACAERQKSYTIGRAHCSGQKFDVFKCLDHCAAP, SEQ ID NO: 238), or E2H, M13H, and K16H (EHDCKVHCVKEWHAGHACAERQKSYTIGRAHCSGQKFDVFKCLDHCAAP, SEQ ID NO: 239) were compared to SEQ ID NO: 187. The variant corresponding to SEQ ID NO: 233, containing substitutions at E2H and K16H, showed strong binding to PD-L1 at pH 7.4 and substantial loss of binding at pH 5.5 (black arrow). The other variants and the parent peptide showed varying levels of PD-L1 binding at pH 7.4 and at pH 5.5, with varying degrees of pH dependence to the binding.

### Example 10

### Development of Selective Depletion Complexes Containing pH-Dependent PD-L1-Binding Peptides for Selective Depletion of PD-L1

[0410] This example describes development of selective depletion complexes containing pH-dependent PD-L1-binding peptides for selective depletion of PD-L1. Peptides with high PD-L1 binding affinity at physiologic extracellular pH but a significantly reduced binding affinity at lower pH levels such as endosomal pH of 5.5 are selected for cellular binding, uptake, and intra-endosomal or intra-vesicular release as described in EXAMPLE 9. PD-L1-binding peptides with high endosomal delivery capabilities are identified and characterized. PD-L1 binding peptides with high PD-L1 binding affinity at physiologic extracellular pH (e.g., pH 7.4) and reduced binding affinity at endosomal pH (e.g., pH 5.5) are fused recombinantly, chemically synthesized as a single fusion, separately recombinantly expressed and conjugated, or separately chemically synthesized and conjugated to a TfR-binding peptide with a TfR-binding affinity that is substantially the same at a physiologic extracellular pH and at endosomal pH (e.g., a TfR-binding peptide of any one of SEQ ID NO: 96, SEQ ID NO: 65-SEQ ID NO: 95, SEQ ID NO: 97-SEQ ID NO: 128, SEQ ID NO: 220-SEQ ID NO: 222, or SEQ ID NO: 1-SEQ ID NO: 64), optionally with any linker or no linker in between the PD-L1 binding peptide and the TfR binding peptide.

[0411] A sample screening pipeline showing progression from screening for target binding CDPs, to modifying such CDPs for pH-dependent binding, to incorporation into compositions for selective depletion is shown in FIG. 11A. A peptide library of CDPs is screened for the ability to bind to a target molecule. Target-binding peptides from the library are distinguished by accumulation of signal from bound target molecules. Optionally, identified target-binding peptides are selected and further matured for binding, for example using point mutation screens. Identified target binding peptides are converted to pH-dependent binders, for example by performing histidine point mutation scans as illustrated in FIG. 11D and described in EXAMPLE 9. The pH-dependent target-binding peptide is fused or linked to a recycler peptide (e.g., a TfR-binding peptide of any of SEQ ID NO: 96, SEQ ID NO: 65-SEQ ID NO: 95, SEQ ID NO: 97-SEQ ID NO: 128, SEQ ID NO: 220-SEQ ID NO: 222, or SEQ ID NO: 1-SEQ ID NO: 64), to form a selective depletion complex. Optionally, the selective depletion complexes are validated by testing target depletion in cells expressing the selective depletion complexes, as shown in FIG. 11B. Complexes can be further tested in healthy cells and in transformed cell lines to measure disease-specific functionalities of the selective depletion complexes, as shown in FIG. 11C. Specificity of the complexes is measured by testing for changes in a target-specific cellular function, such as cancer-specific growth inhibition upon depletion of an apoptosis inhibitor. Target-specific cellular functions can depend on extrinsic or intrinsic factors, or a combination of extrinsic and intrinsic factors. Degradation of the target and selective impairment of cancer cells suggests that a therapeutic window exists in patients.

[0412] Cancer-specific growth inhibition by a selective depletion complex comprising a PD-L1-binding peptide may be tested using cells co-cultured with T cells. By removing some PD-L1 from cancer cell surfaces, the checkpoint inhibition signaling can be reduced, and the tumor cells can be more likely to be recognized by and attacked by the immune system, leading to reduced tumor growth, reduced metastasis, or increase of other beneficial tumor responses.

### Example 11

### Selective Depletion of a Soluble Target Molecule Via TfR-Mediated Endocytosis

[0413] This example describes selective depletion of a soluble target molecule via TfR-mediated endocytosis. A composition containing a TfR-binding peptide (e.g., any one of SEQ ID NO: 96, SEQ ID NO: 65-SEQ ID NO: 95, SEQ ID NO: 97-SEQ ID NO: 128, SEQ ID NO: 220-SEQ ID NO: 222, or SEQ ID NO: 1-SEQ ID NO: 64) conjugated to a target-binding peptide is contacted to cells expressing TfR. The TfR-binding peptide binds TfR with high affinity at both physiologic extracellular pH (such as pH 7.4) and at endosomal pH (such as pH 5.5), and the target-binding peptide binds to a soluble target molecule with higher affinity at physiologic extracellular pH and with lower affinity at endosomal pH. Upon contact, the TfR-binding peptide binds to TfR on the cell surface, and the target-binding peptide binds to the soluble target molecule in solution (FIG. 12A, (1)). The composition containing the TfR-binding peptide and the target-binding peptide is endocytosed via TfR-mediated endocytosis along with the TfR and the bound target molecule (FIG. 12A, (2)). As the endosomal compartment acidifies, the target molecule is released from the target-binding peptide (FIG. 12A, (3)). The target molecule is then degraded in a lysosomal compartment (FIG. 12A, (4)), and the complex is recycled to the cell surface along with the TfR (FIG. 12A, (5)).

### Example 12

### Selective Depletion of a Surface Target Molecule Via TfR-Mediated Endocytosis

[0414] This example describes selective depletion of a surface target molecule via TfR-mediated endocytosis. A composition containing a TfR-binding peptide (e.g., any one of SEQ ID NO: 96, SEQ ID NO: 65-SEQ ID NO: 95, SEQ ID NO: 97-SEQ ID NO: 128, SEQ ID NO: 220-SEQ ID NO: 222, or SEQ ID NO: 1-SEQ ID NO: 64) conjugated to a target-binding peptide is contacted to cells expressing TfR. The TfR-binding peptide binds TfR with high affinity at both physiologic extracellular pH (such as at pH 7.4) and at endosomal pH (such as at pH 5.5), and the target-binding peptide binds to a surface target molecule with higher affinity at physiologic extracellular pH and with lower affinity at endosomal pH. Upon contact, the TfR-binding peptide binds to TfR on the cell surface, and the target-binding peptide binds to the surface target molecule on the cell surface (FIG. 12B, (1)). The composition containing the TfR-binding peptide and the target-binding peptide is endocytosed via TfR-mediated endocytosis along with the TfR and the bound target molecule (FIG. 12B, (2)). As the endosomal compartment acidifies, the target molecule is released from the target-binding peptide (FIG. 12B, (3)). The target molecule is then degraded in a lysosomal compartment (FIG. 12B, (4)), and the complex is recycled to the cell surface along with the TfR (FIG. 12B, (5)).

### Example 13

### Extension of Peptide Plasma Half-Life Using Serum Albumin-Binding Peptide Complexes

[0415] This example demonstrates a method of extending the serum or plasma half-life of a peptide using serum albumin-binding peptide complexes as disclosed herein. A peptide or peptide complex having a sequence of any one of SEQ ID NO: 96, SEQ ID NO: 65-SEQ ID NO: 95, SEQ ID NO: 97-SEQ ID NO: 128, SEQ ID NO: 220-SEQ ID NO: 222, or SEQ ID NO: 1-SEQ ID NO: 64 is modified in order to increase its plasma half-life. The peptide and the serum half-life extending moiety are fused recombinantly, chemically synthesized as a single fusion, separately recombinantly expressed and conjugated, or separately chemically synthesized and conjugated. Fusing the peptide to a serum albumin-binding peptide extends the serum half-life of the peptide complex. The peptide or peptide complex is conjugated to a serum albumin-binding peptide, such as SA21 (SEQ ID NO: 178). Optionally, the peptide fused to SA21 has a sequence of any one of SEQ ID NO: 181 or SEQ ID NO: 184. Optionally, the peptide fused to SA21 is linked to SA21 via a peptide linker having a sequence of SEQ ID NO: 179. The linker having a sequence corresponding to SEQ ID NO: 179 links two separately functional CDPs to incorporate serum half-life extension function into the peptide or peptide complex. The linker having a sequence corresponding to SEQ ID NO: 179 enables SA21 to cyclize without steric impediment from either member of the peptide complex. Alternatively, conjugation of the peptide to an albumin binder, such as Albu-tag or a fatty acid, such as a C₁₄-C₁₈ fatty acid or palmitic acid, is used to extend plasma half-life. Plasma half-life is also optionally extended as a result of reduced immunogenicity by using minimal non-human protein sequences.

### Example 14

### Purification of a TfR-Binding Serum Albumin-Binding Peptide Fusion

[0416] This example describes the purification of a TfR-binding peptide fused to the serum albumin-binding peptide SA21. FIG. 13A and FIG. 13B illustrate the purification of SA21 fusion peptides. SA21 was recombinantly expressed as a fusion peptide with a CDP and purified by HPLC. Peptides were purified fused to siderocalin (“Scn-CDP”) and cleaved to produce the cleaved SA21 fusion peptide (“CDP”) and siderocalin (“Scn”). FIG. 13A shows purification of a peptide TfR-binding peptide fused to a serum albumin-binding peptide (SA21) corresponding to SEQ ID NO: 181. Purity was verified by SDS-PAGE (left) and RP-HPLC (right) under DTT reducing (“R”) or non-reducing (“NR”) conditions. SDS-PAGE was also run on the uncleaved (“U”) siderocalin-CDP fusion peptide. In the SDS-PAGE, distinct bands were seen corresponding to the siderocalin-CDP fusion (“Scn-CDP”) in the uncleaved (“U”) sample, as well as bands corresponding to the cleaved SA21 fusion (“CDP”), siderocalin alone (“Scn”), and the uncleaved fusion (“Scn-CDP”) in the reduced (“R”) and non-reduced (“NR”) samples. The presence of a single peak in the unreduced RP-HPLC trace was indicative of a pure, undegraded sample. FIG. 13B shows purification of a peptide fused to SA21 corresponding to SEQ ID NO: 182 (GSRLIEDICLPRWGCLWEDDGGGGSGGGGSVRIPVSCKHSGQCLKPCKDAGMRF GKCMNGKCDCTPK). Purity was verified by SDS-PAGE (left) and RP-HPLC (right) under DTT reducing (“R”) or non-reducing (“NR”) conditions. SDS-PAGE was also run on the uncleaved (“U”) siderocalin-CDP fusion peptide. In the SDS-PAGE, distinct bands were seen corresponding to the siderocalin-CDP fusion (“Scn-CDP”) in the uncleaved (“U”) sample, as well as bands corresponding to the cleaved SA21 fusion (“CDP”), siderocalin alone (“Scn”), and the uncleaved fusion (“Scn-CDP”) in the reduced (“R”) and non-reduced (“NR”) samples. The presence of a single peak in the unreduced RP-HPLC trace was indicative of a pure, undegraded sample.

### Example 15

### Linkers for Conjugation and Half-Life Extension of Target-Binding Peptides and TfR-Binding Peptides

[0417] This example describes linkers for conjugation and optionally for half-life extension of target-binding peptides and TfR-binding peptides. A TfR-binding peptide (e.g., any one of SEQ ID NO: 96, SEQ ID NO: 65-SEQ ID NO: 95, SEQ ID NO: 97-SEQ ID NO: 128, SEQ ID NO: 220-SEQ ID NO: 222, or SEQ ID NO: 1-SEQ ID NO: 64) is conjugated to a target-binding peptide (e.g., a target-binding CDP selected for pH-dependent binding as described in EXAMPLE 9) via a linker. The target-binding peptide can be fused to the TfR-binding peptide via a DkTx peptide (SEQ ID NO: 139, KKYKPYVPVTTN) from native CDP dimer, as shown in FIG. 14A. The DkTx peptide linker is from a native knottin-knottin dimer from the Tau-theraphotoxin-Hs1a, also known as DkTx (double-knot toxin), in Haplopelma schmidti. Natively, the DkTx linker separates two independently folding CDP domains and is well-suited for maintaining the function of the two dimerizing CDPs. The target-binding peptide can be fused to the TfR-binding peptide via a poly-GlySer linker such as (SEQ ID NO: 138, GGGSGGGSGGGS), containing varying lengths of glycines interspaced by serines for solubility, as shown in FIG. 14B. The target-binding peptide can be fused to the TfR-binding peptide via a human IgG linker with a Cys-to-Ser mutation at position 5 (SEQ ID NO: 140, EPKSSDKTHT) to prevent crosslinking during secretion, as shown in FIG. 14C. A peptide linker for dimerizing two peptides optionally has the following properties: 1) the linker does not disturb the independent folding of the TfR- and target-binding domains, 2) the linker provides sufficient length to the mature molecule so as to facilitate contact between the target molecule and the TfR via the TfR-binding peptide target-biding peptide dimer, 3) the linker does not negatively impact manufacturability (synthetic or recombinant) of the TfR-binding peptide target-biding peptide dimer, and 4) the linker does not impair any required post-synthesis chemical alteration of the TfR-binding peptide target-biding peptide dimer (e.g., conjugation of a fluorophore or albumin-binding chemical group).

[0418] CDPs (or other protein-based target-engaging modalities) can also be dimerized using immunoglobulin heavy chain Fc domains. These are commonly used in modern molecular medicine to dimerize functional domains, either based on antibodies or other otherwise soluble functional domains. The target-binding peptide can be non-covalently linked to the TfR-binding peptide via an IgG-based Fc domain, as shown in FIG. 15. An Fc domain can be used to homo- or hetero-dimerize functional domains and to impart serum half-life extension via a domain that interacts with the recycling Fc receptor (FcRn). Dimerization can be homodimeric if the Fc sequences are native, but if one wants to drive heterodimer formation, the Fc can be mutated into “knob-in-hole” format, where one Fc CH3 contains novel residues (knob) designed to fit into a cavity (hole) on the other Fc CH3 domain. Through this process, knob+knob dimers are highly energetically unfavorable. Hole+hole dimers can be formed, but if a purification tag is added specifically to the “knob” side, hole+hole dimers can be excluded, ensuring that only knob+hole dimers are purified. Fc domains can separately be used as a recycling receptor-engaging domain, so use of Fc for dimerization can enhance peptide complex recycling or selective degradation complex.

[0419] TfR-binding and target-binding CDPs can be further functionalized and multimerized by adding a third (or more) functional domain. In this example, an albumin-binding domain from a Finegoldia magna peptostreptococcal albumin-binding protein (SEQ ID NO: 192) is shown, as it is a simple three-helical structure that would be unlikely to disturb the independent folding of the other CDP domains. Such added functional domains could be included in any orientation relative to the TfR- and target-binding domains, as shown in FIG. 16A-FIG. 16C. Example peptides are shown with a poly-GlySer linker, but any of a number of linkers (e.g., any one of SEQ ID NO: 129-SEQ ID NO: 141 or SEQ ID NO: 195-SEQ ID NO: 218) could be used. An albumin binding domain (e.g., a peptide of SEQ ID NO: 178 or SEQ ID NO: 192) can be fused to the TfR-binding peptide, the target-binding peptide, or both. The albumin binding domain can include a peptide linker (e.g., any one of SEQ ID NO: 129-SEQ ID NO: 141 or SEQ ID NO: 195-SEQ ID NO: 218). The albumin binding domain can be linked to the target-binding peptide and the TfR-binding peptide, as shown in FIG. 16A. The albumin binding domain can be linked to the target-binding peptide, as shown in FIG. 16B. The albumin binding domain can be linked to the TfR-binding peptide, as shown in FIG. 16C. Addition of the albumin binding domain can increase the serum half-life of a composition containing the TfR-binding peptide and the target-binding peptide.

[0420] Similar methods and designs can be used for selective depletion complexes containing a PD-L1-binding domain (e.g., a PD-L1-binding peptide) rather than a TfR-binding domain the as the recycling receptor, in methods where PD-L1 is used as the recycling receptor.

### Example 16

### Functional Binding of CDP-CDP Dimers Containing a TfR-Binding Peptide and a Target-Binding Peptide

[0421] This example describes functional binding of CDP-CDP dimers containing a TfR-binding peptide and a target-binding peptide. CDP-CDP dimers containing a TfR-binding peptide of SEQ ID NO: 2 and an ion-channel inhibitory CDP. The TfR-binding peptide was linked to a peptide inhibitor of the Kv1.3 voltage-gated potassium channel (Z1E-AnTx, Z1P-AnTx, EWSS-ShK, HsTx, Pro-Vm24, or Vm24) by either a DkTx linker (SEQ ID NO: 139) or a GS3 linker (SEQ ID NO: 141). The CDP-CDP dimer peptides were expressed as a fusion with a siderocalin carrier peptide (SEQ ID NO: 147), which was cleaved off with a TEV protease. The purified peptides were run on an SDS-PAGE gel to verify that the peptide fusions were intact (FIG. 17A). Each gel contained, from left to right, a molecular weight latter (“L”), the peptide sample under non-reducing conditions (“NR”), and the peptide sample under reducing conditions (“R”). The easily distinguishable bands in the peptide sample lanes corresponded to, from top to bottom, uncleaved CDP-CDP dimer with siderocalin, cleaved siderocalin, and cleaved CDP-CDP dimer. All of the CDP-CDP dimer complexes expressed well, as indicated by the band intensity, and appeared folded, as indicated by the shift upon reduction with DTT.

[0422] In a second assay, a different TfR-binding CDP corresponding to SEQ ID NO: 32 was fused to the Vm24 ion channel inhibitor via a polyGly-Ser linker (SEQ ID NO: 138). The resulting CDP-CDP dimer was purified and run on an SDS-PAGE gel (FIG. 17B, left bottom). The TfR-binding peptide (SEQ ID NO: 32) and the Vm24 ion channel-inhibiting CDP were also purified individually (FIG. 17B, left top and left middle). Purity of the TfR-binding peptide, the ion channel-inhibiting CDP, and the CDP-CDP dimer was compared using reverse phase high pressure liquid chromatography (RP-HPLC, FIG. 17B, center). The ability of each complex to inhibit a Kv1.3 ion channel was then tested (FIG. 17B, right). The CDP-CDP dimer retained its ability to inhibit the ion channel compared to the ion channel-inhibiting CDP alone. As expected, the TfR-binding peptide alone did not inhibit Kv1.3.

### Example 17

### Cross Reactivity of TfR-Binding Peptides to Murine TfR

[0423] This example illustrates cross reactivity of TfR-binding peptides of the present disclosure to murine TfR in cell surface binding assays. 293F cells expressing either human or mouse TfR on their surface were stained with soluble TfR-binding peptides that were directly labeled with AlexaFluor 647 dye via NHS-ester conjugation. FIG. 18A and FIG. 18B show flow cytometry plots that verify human versus mouse TfR expression using species-specific antibodies. FIG. 18C and FIG. 18D demonstrate that the peptides effectively bind to both homologs. In a similar experiment, flow cytometry was used to demonstrate effective binding of SEQ ID NO: 1, SEQ ID NO: 2, SEQ ID NO: 32, and Anti-Tf antibodies (positive controls).

### Example 18

### Activation of Neuronal CRE Reporter Mice

[0424] This example describes activation of neuronal CRE transporter mice using peptide complexes comprising one or more TfR-binding peptides as described herein. In this case, a fusion peptide comprising TfR-binding peptides and a neurotensin peptide was used. Peptides corresponding to SEQ ID NO: 1, SEQ ID NO: 2, and SEQ ID NO: 32 (SEQ ID NO: 1, SEQ ID NO: 2, and SEQ ID NO: 32 are SEQ ID NO: 65, SEQ ID NO: 66, and SEQ ID NO: 96, respectively, with an added N-terminal GS) were fused with neurotensin at the C-terminus of each peptide to produce the peptide-NT complexes. The downstream activity of neurotensin involves intracellular Ca²⁺ regulation and cAMP response element (CRE) driven transcriptional programs (FIG. 19A), and its modulation has been explored for suppression of chronic pain. Peptide-NT were expressed recombinantly in 293F cells and purified. Molecular weights of the purified peptides were verified using mass spectrometry.

[0425] Binding to the neurotensin receptor was demonstrated with a HEK-293 cell line expressing NTSR1. To demonstrate that the neurotensin extension on various proteins was functional, NTSR activity in HEK293 cells, or HEK293 cells transduced with a lentivector delivering human NTSR1 (HEK293-NTSR1), was measured using the IP-One-Gq kit (CisBio 62IPAPEB, FIG. 19B). Cells were grown in DMEM+10% fetal bovine serum, removed from the plates with Accutase, pelleted, and suspended in Hanks Buffered Salt Solution at a density of 1.5×10⁶ cells per mL. HTFR reactions were set up in HTFR 96 well low volume plates (CisBio #66PL96025) according to the manufacturer's instructions. 10,000 cells (7 μL) were used per 25 μL reaction. The plate was incubated for 60 mins at 37° C. Then 3 μL IP1-d2 working solution was then added, followed by 3 μL Anti IP1-Cryptate working solution. After incubating for 1 hour at room temperature, the plate was scanned in a Perkin Elmer 2104 EnVision Multilabel Reader for fluorescence emission after excitement at 665 nm and 620 nm wavelengths. FRET ratio was calculated as 10,000× (Signal 665 nm/Signal 620 nm). In mammalian HEK-293 cells neurotensin (NT) receptor engagement showed IP₁ accumulation only in response to NT or NT peptide complexes (SEQ ID NO: 1 conjugated to NT and SEQ ID NO: 32 conjugated to NT), as well as mTf-NT and NT, but not for SEQ ID NO: 1 or SEQ ID NO: 32, vehicle, or mTf), N=3 wells for all except vehicle, which had N=36 (FIG. 19B). Horizontal bar indicates sample mean.

### Example 19

### Development of a High Affinity and pH-Dependent EGFR Binding Nanobody

[0426] This example describes development of a high affinity and pH-dependent EGFR binding nanobody. A nanobody that binds EGFR (QVKLEESGGGSVQTGGSLRLTCAASGRTSRSYGMGWFRQAPGKEREFVSGISWRGDS TGYADSVKGRFTISRDNAKNTVDLQMNSLKPEDTAIYYCAAAAGSAWYGTLYEYDY WGQGTQVTVSS, SEQ ID NO: 219) was modified for higher affinity and for pH-dependent binding to EGFR. A peptide library containing histidine point mutations at each residue in the two complementarity-determining regions shown by crystal structure to interact with EGFR (underlined in SEQ ID NO: 219 showing CDR1 and CDR3, respectively) was generated. Because CDR1 contains 10 non-histidine residues, one can generate up to 56 variants with 0, 1, or 2 histidines. Because CDR3 contains 17 non-histidine residues, one can generate up to 154 variants with 0, 1, or 2 histidines. Histidine mutants were tested individually and then hits combined into a single VHH variant, or they were genetically recombined and tested as a variant library of 56×154=8,624 members. Hits from this library were identified by screening for retaining high cell staining/affinity at pH ˜7.4 and demonstrating low cell staining/affinity at pH˜6 or lower.

[0427] Two EGFR-binding nanobodies were identified using this screen. A first EGFR-binding nanobody (SEQ ID NO: 242) was identified as a high-affinity EGFR-binding peptide that bound EGFR with higher affinity than SEQ ID NO: 219. A second EGFR-binding nanobody (SEQ ID NO: 243) was identified as a pH-dependent EGFR-binding nanobody that bound to EGFR with high affinity at ˜7.4 and showed a decrease in binding affinity at ˜6 or lower.

### Example 20

### Site Saturation Mutagenesis to Identify pH-Dependent Target Binding Peptides

[0428] This example describes site saturation mutagenesis to identify pH-dependent target binding peptides. A peptide (e.g., a nanobody) that binds to a target molecule (e.g., PD-L1, VEGF, PD-1, EGFR, CD38, GD2, SLAMF7, CTLA-4, CCR4, CD20, PDGFRα, VEGFR2, HER2, CD33, CD30, CD22, CD79B, Nectin-4, or TROP2) is modified for pH-dependent binding by performing site saturation mutagenesis as described with respect to a TfR-binding peptide in EXAMPLE 5. The site saturation mutant library is screened for binding to the target molecule at physiologic extracellular pH (e.g., pH 7.4) and at endosomal pH (e.g., pH 5.5). Mutants that show a higher binding affinity at physiologic extracellular pH and reduced binding affinity at endosomal pH are selected and further screened. Subsequent rounds of site saturation mutagenesis are performed on the hits to further improve pH-dependent binding.

### Example 21

### Delivery of Selective Depletion Complexes Using Gene Therapy or Cell Therapy

[0429] This example describes delivery of selective depletion complexes using an oncolytic herpes simplex virus. A gene encoding expression and secretion of a selective depletion complex is introduced to a target cell using an oncolytic herpes simplex virus (oHSV) vector. For gene therapy, the target cell is a cell within a patient. For cell therapy, a target cell is a patient cell that has been collected and is re-introduced into the patient after modification with the viral vector. The oHSV infects cancer cells, and cancer cells that are not killed by the virus express and secrete the selective depletion complex. The remaining cells modify the tumor microenvironment to suppress immune activity against the cancer cells. Selective depletion complexes are secreted from the tumor cells in situ and act on the cancers are directed against immunosuppressive factors on T cells or in the tumor microenvironment.

[0430] Alternatively, selective depletion complexes that modify tumor or T-cell activity could are engineered into CAR-T cells or other cellular therapies. CAR-T cells are already being specialized through genetic modification to target tumor tissue, killing tumor cells that carry cell surface markers targeted by the expressed chimeric antigen receptors (CAR). If supplemental activity is desired, such as suppression of regulatory, immunosuppressive signaling present in these tumors, the CAR-T cell is engineered to also secrete selective depletion complexes that suppress regulatory, immunosuppressive signaling.

### Example 22

### Ternary Complex Formation Between Selective Depletion Complexes, Target Molecules, and Receptors

[0431] This example describes ternary complex formation between selective depletion complexes, target molecules, and receptors while on the surface of a cell. Selective depletion complexes (SDCs) containing a target-binding peptide, a first peptide linker (GGGGS×4, SEQ ID NO: 224), an albumin binding peptide (SEQ ID NO: 227), a second peptide linker (GGGGS×4, SEQ ID NO: 224), and a TfR-binding peptide were designed to bind a target molecule and a transferrin receptor, as illustrated in FIG. 23A. SDCs can contain one binding end that binds in a pH dependent fashion. Preferably, the pH dependent binding has a significant differential in binding at endosomal pH (e.g., pH 5.5, 6.0, 6.5, 5.0, 4.5) versus binding at extracellular pH (e.g., pH 7.4, 7.0); however milder differences in endosomal versus extracellular pH binding may also be effective. Peptide complexes containing: a target-binding peptide that binds EGFR with mild pH dependence (SEQ ID NO: 244) and a low affinity TfR-binding peptide with a sequence of REGCASHCTKYKAELEKCEARVSSRSNTEETCVQELFDFLHCVDHCVSQ corresponding to SEQ ID NO: 232 (peptide 1, SEQ ID NO: 367, NSDSECPLSHDGYCLHGGVCMYIKAVDRYACNCVVGYIGERCQYRDLTWWGPRGTG GGGSGGGGSGGGGSGGGGSLKEAKEKAIEELKKAGITSDYYFDLINKAKAVEGVNALK DEILKAGGGGSGGGGSGGGGSGGGGSREGCASHCTKYKAELEKCEARVSSRSNTEETC VQELFDFLHCVDHCVSQ); a target-binding peptide that binds EGFR (SEQ ID NO: 244) and a high affinity TfR-binding peptide corresponding to SEQ ID NO: 96 (peptide 2, SEQ ID NO: 328); a target-binding peptide that binds PD-L1 with moderate pH dependence (SEQ ID NO: 187) and a low affinity TfR-binding peptide corresponding to SEQ ID NO: 232 (peptide 3, SEQ ID NO: 357, EEDCKVHCVKEWMAGKACAERQKSYTIGRAHCSGQKFDVFKCLDHCAAPGTGGGGS GGGGSGGGGSGGGGSLKEAKEKAIEELKKAGITSDYYFDLINKAKAVEGVNALKDEIL KAGGGGSGGGGSGGGGSGGGGSREGCASHCTKYKAELEKCEARVSSRSNTEETCVQE LFDFLHCVDHCVSQ); or a target-binding peptide that binds PD-L1 with moderate pH dependence (SEQ ID NO: 187) and a high affinity TfR-binding peptide corresponding to SEQ ID NO: 96 (peptide 4, SEQ ID NO: 356; EEDCKVHCVKEWMAGKACAERQKSYTIGRAHCSGQKFDVFKCLDHCAAPGTGGGGS GGGGSGGGGSGGGGSLKEAKEKAIEELKKAGITSDYYFDLINKAKAVEGVNALKDEIL KAGGGGSGGGGSGGGGSGGGGSREGCASRCMKYNDELEKCEARMMSMSNTEEDCEQ ELEDLLYCLDHCHSQ) were expressed and purified, as shown in FIG. 23B. FIG. 23B shows SDS-PAGE analysis of the four peptide complexes, confirming successful expression and purification of the molecules. The four peptide complexes were screened for their ability to form ternary complexes by binding to both a cell surface-expressed target molecule (EGFR or PD-L1) and a receptor molecule (soluble TfR ectodomain fluorescently labeled with streptavidin-647).

[0432] Cells expressing either EGFR or PD-L1 were co-stained with the four peptide complexes, corresponding to SEQ ID NO: 367 (1), SEQ ID NO: 328 (2), SEQ ID NO: 357 (3), and SEQ ID NO: 356 (4) and labeled with soluble TfR ectodomain fluorescently labeled with streptavidin-647, and the binding of the molecules to the cell surfaces was assessed by flow cytometry as shown in FIG. 23C. The selective depletion complex containing an EGFR-binding peptide and a high-affinity TfR-binding peptide (peptide 2, corresponding to SEQ ID NO: 328) formed ternary complexes with cells expressing EGFR (left) but not with cells expressing PD-L1 (right). Conversely, the selective depletion complex containing a PD-L1-binding peptide and a high-affinity TfR-binding peptide (peptide 4, corresponding to SEQ ID NO: 356) formed ternary complexes with cells expressing PD-L1 (right) but not with cells expressing EGFR (left). Comparator peptide complexes with low affinity binding to TfR (peptides 1 and 3, corresponding to SEQ ID NO: 367 and SEQ ID NO: 357, respectively) did not form ternary complexes, as seen by a lack of fluorescent labeling in the right and left panels of FIG. 23C. Together, this data demonstrates that selective depletion molecules containing a target-binding peptide and a high-affinity receptor-binding peptide form ternary complexes with the target (e.g., EGFR or PD-L1) and the receptor (e.g., TfR) on a cell surface.

[0433] Additional selective complexes and complex components use as comparators are provided in TABLE 11.

TABLE 11
Comparator Peptide Complexes and Complex Components

| SEQ ID | |
|---|---|
| NO | Sequence |
| SEQ ID | QVKLEESGGGSVQTGGSLRLTCAASGHTSRSYGMHWFRQAPGKEREFV |
| NO: 314 | SGISWRGDSTGYADSVKGRFTISRDNAKNTVDLQMNSLKPEDTAIYYCA |
| | AAAGSHWYGTHYEYDYWGQGTQVTVSSGGGGSGGGGSGGGGSEPKSS |
| | DKTHTCPPCPAPEAAGGPSVFLFPPKPKDTLMISRTPEVTCVVVDVSHED |
| | PEVKFNWYVDGVEVHNAKTKPREEQYNSTYRVVSVLTVLHQDWLNGK |
| | EYKCKVSNKALGAPIEKTISKAKGQPREPQVYTLPPSREEMTKNQVSLTC |
| | LVKGFYPSDIAVEWESNGQPENNYKTTPPVLDSDGSFFLYSKLTVDKSR |
| | WQQGNVFSCSVMHEALHNHYTQKSLSLSPGKGGGGSGGGGSGGGGSRE |
| | GCASHCTKYKAELEKCEARVSSRSNTEETCVQELFDFLHCVDHCVSQ |
| SEQ ID | REGCASRCMKYNDELEKCEARMMSMSNTEEDCEQELEDLLYCLDHCHS |
| NO: 349 | QGGGGSGGGGSGGGGSQVKLEESGGGSVQTGGSLRLTCAASGHTSRSY |
| | GMGWFRQAPGKEREFVSGISWRGDSTGYADSVKGRFTISRDNAKNTVD |
| | LQMNSLKPEDTAIYYCAAAAGSAWYHTLYEYDYWGQGTQVTVSS |
| SEQ ID | QVQLQESGGGVVQPGRSLRLSCAASRFTFNNYAMHWVRQAPGKGLEW |
| NO: 350 | VAVISYDGSNKYYADSVKGRFTISRDNSKNTLYLQMNSLRAEDTAVYYC |
| | ARDLSGYGDYPDYWGQGTLVTVSSGGGGSGGGGSGGGGSSELTQDPAV |
| | SVALGQTVRITCQGDSLRSYYASWYQQKPGQAPVLVMYGRNERPSGVP |
| | DRFSGSKSGTSASLAISGLQPEDEANYYCAGWDDSLTGPVFGGGTKLTV |
| | LGGGGGSGGGGSGGGGSQVKLEESGGGSVQTGGSLRLTCAASGHTSRS |
| | YGMGWFRQAPGKEREFVSGISWRGDSTGYADSVKGRFTISRDNAKNTV |
| | DLQMNSLKPEDTAIYYCAAAAGSAWYHTLYEYDYWGQGTQVTVSS |
| SEQ ID | QVKLEESGGGSVQTGGSLRLTCAASGHTSRSYGMGWFRQAPGKEREFV |
| NO: 353 | SGISWRGDSTGYADSVKGRFTISRDNAKNTVDLQMNSLKPEDTAIYYCA |
| | AAAGSAWYHTLYEYDYWGQGTQVTVSSGGGGSGGGGSGGGGSEPKSS |
| | DKTHTCPPCPAPEAAGGPSVFLFPPKPKDTLMISRTPEVTCVVVDVSHED |
| | PEVKFNWYVDGVEVHNAKTKPREEQYNSTYRVVSVLTVLHQDWLNGK |
| | EYKCKVSNKALGAPIEKTISKAKGQPREPQVYTLPPSREEMTKNQVSLTC |
| | LVKGFYPSDIAVEWESNGQPENNYKTTPPVLDSDGSFFLYSKLTVDKSR |
| | WQQGNVFSCSVMHEALHNHYTQKSLSLSPGKGGGGSGGGGSGGGGSRE |
| | GCASRCMKYNDELEKCEARMMSMSNTEEDCEQELEDLLYCLDHCHSQ |
| SEQ ID | QVQLVESGGALVQPGGSLRLSCAASGFPVNRYSMRWYRQAPGKEREWV |
| NO: 354 | AGMSSAGDRSSYEDSVKGRFTISRDDARNTVYLQMNSLKPEDTAVYYC |
| | NVNVGFEYWGQGTQVTVSSGGGGSGGGGSGGGGSEPKSSDKTHTCPPC |
| | PAPEAAGGPSVFLFPPKPKDTLMISRTPEVTCVVVDVSHEDPEVKFNWYV |
| | DGVEVHNAKTKPREEQYNSTYRVVSVLTVLHQDWLNGKEYKCKVSNK |
| | ALGAPIEKTISKAKGQPREPQVYTLPPSREEMTKNQVSLTCLVKGFYPSDI |
| | AVEWESNGQPENNYKTTPPVLDSDGSFFLYSKLTVDKSRWQQGNVFSCS |
| | VMHEALHNHYTQKSLSLSPGKGGGGGGGGSGGGGSREGCASRCMKY |
| | NDELEKCEARMMSMSNTEEDCEQELEDLLYCLDHCHSQ |
| SEQ ID | EEDCKVHCVKEWMAGKACAERQKSYTIGRAHCSGQKFDVFKCLDHCA |
| NO: 357 | APGTGGGGSGGGGSGGGGSGGGGSLKEAKEKAIEELKKAGITSDYYFDL |
| | INKAKAVEGVNALKDEILKAGGGGSGGGGSGGGGSGGGGSREGCASHC |
| | TKYKAELEKCEARVSSRSNTEETCVQELFDFLHCVDHCVSQ |
| SEQ ID | EHDCKVHCVKEWMAGHACAERQKSYTIGRAHCSGQKFDVFKCLDHCA |
| NO: 366 | APGTGGGGSGGGGSGGGGSGGGGSLKEAKEKAIEELKKAGITSDYYFDL |
| | INKAKAVEGVNALKDEILKAGGGGSGGGGSGGGGSGGGGSREGCASHC |
| | TKYKAELEKCEARVSSRSNTEETCVQELFDFLHCVDHCVSQ |
| SEQ ID | NSDSECPLSHDGYCLHGGVCMYIKAVDRYACNCVVGYIGERCQYRDLT |
| NO: 367 | WWGPRGTGGGGSGGGGSGGGGSGGGGSLKEAKEKAIEELKKAGITSDY |
| | YFDLINKAKAVEGVNALKDEILKAGGGGSGGGGSGGGGSGGGGSREGC |
| | ASHCTKYKAELEKCEARVSSRSNTEETCVQELFDFLHCVDHCVSQ |
| SEQ ID | QVKLEESGGGSVQTGGSLRLTCAASGRTSRSYGMGWFRQAPGKEREFVS |
| NO: 368 | GISWRGDSTGYADSVKGRFTISRDNAKNTVDLQMNSLKPEDTAIYYCAA |
| | AAGSAWYGTLYEYDYWGQGTQVTVSSGTGGGGSGGGGSGGGGSGGG |
| | GSLKEAKEKAIEELKKAGITSDYYFDLINKAKTVEGVNALKDEILKAGGG |
| | GSGGGGSGGGGSGGGGSREGCASRCMKYNDELEKCEARMMSMSNTEE |
| | DCEQELEDLLYCLDHCHSQ |
| SEQ ID | QVKLEESGGGSVQTGGSLRLTCAASGRTSRSYGMGWFRQAPGKEREFVS |
| NO: 369 | GISWRGDSTGYADSVKGRFTISRDNAKNTVDLQMNSLKPEDTAIYYCAA |
| | AAGSAWYGTLYEYDYWGQGTQVTVSSGTGGGGSGGGGSGGGGSGGG |
| | GSLKEAKEKAIEELKKAGITSDYYFDLINKAKAVEGVNALKDEILKAGG |
| | GGSGGGGSGGGGSGGGGSREGCASRCMKYNDELEKCEARMMSMSNTE |
| | EDCEQELEDLLYCLDHCHSQ |
| SEQ ID | QVKLEESGGGSVQTGGSLRLTCAASGRTSRSYGMGWFRQAPGKEREFVS |
| NO: 370 | GISWRGDSTGYADSVKGRFTISRDNAKNTVDLQMNSLKPEDTAIYYCAA |
| | AAGSAWYGTLYEYDYWGQGTQVTVSSGTGGGGSGGGGSGGGGSGGG |
| | GSLKEAKEKAIEELKKAGITSDYYFDLINKAKAVEGVNALKDEILKAGG |
| | GGSGGGGSGGGGSGGGGSREGCASHCTKYKAELEKCEARVSSRSNTEET |
| | CVQELFDFLHCVDHCVSQ |
| SEQ ID | QVKLEESGGGSVQTGGSLRLTCAASGRTSRSYGMGWFRQAPGKEREFVS |
| NO: 372 | GISWRGDSTGYADSVKGRFTISRDNAKNTVDLQMNSLKPEDTAIYYCAA |
| | AAGSAWYGTLYEYDYWGQGTQVTVSSGTGGGGSGGGGSGGGGSGGG |
| | GSEPKSCDKTHTCPPCPAPEAAGGPSVFLFPPKPKDTLMISRTPEVTCVVV |
| | DVSHEDPEVKFNWYVDGVEVHNAKTKPREEQYNSTYRVVSVLTVLHQD |
| | WLNGKEYKCKVSNKALGAPIEKTISKAKGQPREPQVYTLPPSRDELTKN |
| | QVSLSCAVKGFYPSDIAVEWESNGQPENNYKTTPPVLDSDGSFFLVSKLT |
| | VDKSRWQQGNVFSCSVMHEALHNHYTQKSLSLSPGKGGGGSGGGGSG |
| | GGGSREGCASRCMKYNDELEKCEARMMSMSNTEEDCEQELEDLLYCLD |
| | HCHSQ |
| SEQ ID | QVKLEESGGGSVQTGGSLRLTCAASGRTSRSYGMGWFRQAPGKEREFVS |
| NO: 374 | GISWRGDSTGYADSVKGRFTISRDNAKNTVDLQMNSLKPEDTAIYYCAA |
| | AAGSAWYGTLYEYDYWGQGTQVTVSSGTGSPVPSTPPTPSPSTPPTPSPS |
| | ASLKEAKEKAIEELKKAGITSDYYFDLINKAKTVEGVNALKDEILKAGSP |
| | VPSTPPTPSPSTPPTPSPSASREGCASRCMKYNDELEKCEARMMSMSNTE |
| | EDCEQELEDLLYCLDHCHSQ |
| SEQ ID | QVKLEESGGGSVQTGGSLRLTCAASGRTSRSYGMGWFRQAPGKEREFVS |
| NO: 375 | GISWRGDSTGYADSVKGRFTISRDNAKNTVDLQMNSLKPEDTAIYYCAA |
| | AAGSAWYGTLYEYDYWGQGTQVTVSSGTGSPVPSTPPTPSPSTPPTPSPS |
| | ASLKEAKEKAIEELKKAGITSDYYFDLINKAKAVEGVNALKDEILKAGSP |
| | VPSTPPTPSPSTPPTPSPSASREGCASRCMKYNDELEKCEARMMSMSNTE |
| | EDCEQELEDLLYCLDHCHSQ |
| SEQ ID | QVKLEESGGGSVQTGGSLRLTCAASGRTSRSYGMGWFRQAPGKEREFVS |
| NO: 377 | GISWRGDSTGYADSVKGRFTISRDNAKNTVDLQMNSLKPEDTAIYYCAA |
| | AAGSAWYGTLYEYDYWGQGTQVTVSSGTGSPVPSTPPTPSPSTPPTPSPS |
| | ASEPKSCDKTHTCPPCPAPEAAGGPSVFLFPPKPKDTLMISRTPEVTCVVV |
| | DVSHEDPEVKFNWYVDGVEVHNAKTKPREEQYNSTYRVVSVLTVLHQD |
| | WLNGKEYKCKVSNKALGAPIEKTISKAKGQPREPQVYTLPPSRDELTKN |
| | QVSLSCAVKGFYPSDIAVEWESNGQPENNYKTTPPVLDSDGSFFLVSKLT |
| | VDKSRWQQGNVFSCSVMHEALHNHYTQKSLSLSPGKGGGGSGGGGSG |
| | GGGSREGCASRCMKYNDELEKCEARMMSMSNTEEDCEQELEDLLYCLD |
| | HCHSQ |
| SEQ ID | QVKLEESGGGSVQTGGSLRLTCAASGHTSRSYGMGWFRQAPGKEREFV |
| NO: 379 | SGISWRGDSTGYADSVKGRFTISRDNAKNTVDLQMNSLKPEDTAIYYCA |
| | AAAGSAWYHTLYEYDYWGQGTQVTVSSGTGGGGSGGGGSGGGGSGG |
| | GGSLKEAKEKAIEELKKAGITSDYYFDLINKAKTVEGVNALKDEILKAGG |
| | GGSGGGGSGGGGSGGGGSREGCASRCMKYNDELEKCEARMMSMSNTE |
| | EDCEQELEDLLYCLDHCHSQ |
| SEQ ID | QVKLEESGGGSVQTGGSLRLTCAASGHTSRSYGMGWFRQAPGKEREFV |
| NO: 380 | SGISWRGDSTGYADSVKGRFTISRDNAKNTVDLQMNSLKPEDTAIYYCA |
| | AAAGSAWYHTLYEYDYWGQGTQVTVSSGTGGGGSGGGGSGGGGSGG |
| | GGSLKEAKEKAIEELKKAGITSDYYFDLINKAKAVEGVNALKDEILKAG |
| | GGGSGGGGSGGGGSGGGGSREGCASRCMKYNDELEKCEARMMSMSNT |
| | EEDCEQELEDLLYCLDHCHSQ |
| SEQ ID | QVKLEESGGGSVQTGGSLRLTCAASGHTSRSYGMGWFRQAPGKEREFV |
| NO: 381 | SGISWRGDSTGYADSVKGRFTISRDNAKNTVDLQMNSLKPEDTAIYYCA |
| | AAAGSAWYHTLYEYDYWGQGTQVTVSSGTGGGGSGGGGSGGGGSGG |
| | GGSLKEAKEKAIEELKKAGITSDYYFDLINKAKAVEGVNALKDEILKAG |
| | GGGSGGGGSGGGGSGGGGSREGCASHCTKYKAELEKCEARVSSRSNTE |
| | ETCVQELFDFLHCVDHCVSQ |
| SEQ ID | QVKLEESGGGSVQTGGSLRLTCAASGHTSRSYGMGWFRQAPGKEREFV |
| NO: 383 | SGISWRGDSTGYADSVKGRFTISRDNAKNTVDLQMNSLKPEDTAIYYCA |
| | AAAGSAWYHTLYEYDYWGQGTQVTVSSGTGGGGSGGGGSGGGGSGG |
| | GGSEPKSCDKTHTCPPCPAPEAAGGPSVFLFPPKPKDTLMISRTPEVTCVV |
| | VDVSHEDPEVKFNWYVDGVEVHNAKTKPREEQYNSTYRVVSVLTVLHQ |
| | DWLNGKEYKCKVSNKALGAPIEKTISKAKGQPREPQVYTLPPSRDELTK |
| | NQVSLSCAVKGFYPSDIAVEWESNGQPENNYKTTPPVLDSDGSFFLVSKL |
| | TVDKSRWQQGNVFSCSVMHEALHNHYTQKSLSLSPGKGGGGSGGGGSG |
| | GGGSREGCASRCMKYNDELEKCEARMMSMSNTEEDCEQELEDLLYCLD |
| | HCHSQ |
| SEQ ID | QVKLEESGGGSVQTGGSLRLTCAASGHTSRSYGMGWFRQAPGKEREFV |
| NO: 385 | SGISWRGDSTGYADSVKGRFTISRDNAKNTVDLQMNSLKPEDTAIYYCA |
| | AAAGSAWYHTLYEYDYWGQGTQVTVSSGTGSPVPSTPPTPSPSTPPTPSP |
| | SASLKEAKEKAIEELKKAGITSDYYFDLINKAKTVEGVNALKDEILKAGS |
| | PVPSTPPTPSPSTPPTPSPSASREGCASRCMKYNDELEKCEARMMSMSNT |
| | EEDCEQELEDLLYCLDHCHSQ |
| SEQ ID | QVKLEESGGGSVQTGGSLRLTCAASGHTSRSYGMGWFRQAPGKEREFV |
| NO: 386 | SGISWRGDSTGYADSVKGRFTISRDNAKNTVDLQMNSLKPEDTAIYYCA |
| | AAAGSAWYHTLYEYDYWGQGTQVTVSSGTGSPVPSTPPTPSPSTPPTPSP |
| | SASLKEAKEKAIEELKKAGITSDYYFDLINKAKAVEGVNALKDEILKAGS |
| | PVPSTPPTPSPSTPPTPSPSASREGCASRCMKYNDELEKCEARMMSMSNT |
| | EEDCEQELEDLLYCLDHCHSQ |
| SEQ ID | QVKLEESGGGSVQTGGSLRLTCAASGHTSRSYGMGWFRQAPGKEREFV |
| NO: 388 | SGISWRGDSTGYADSVKGRFTISRDNAKNTVDLQMNSLKPEDTAIYYCA |
| | AAAGSAWYHTLYEYDYWGQGTQVTVSSGTGSPVPSTPPTPSPSTPPTPSP |
| | SASEPKSCDKTHTCPPCPAPEAAGGPSVFLFPPKPKDTLMISRTPEVTCVV |
| | VDVSHEDPEVKFNWYVDGVEVHNAKTKPREEQYNSTYRVVSVLTVLHQ |
| | DWLNGKEYKCKVSNKALGAPIEKTISKAKGQPREPQVYTLPPSRDELTK |
| | NQVSLSCAVKGFYPSDIAVEWESNGQPENNYKTTPPVLDSDGSFFLVSKL |
| | TVDKSRWQQGNVFSCSVMHEALHNHYTQKSLSLSPGKGGGGSGGGGSG |
| | GGGSREGCASRCMKYNDELEKCEARMMSMSNTEEDCEQELEDLLYCLD |
| | HCHSQ |
| SEQ ID | QVKLEESGGGSVQTGGSLRLTCAASGHTSRSYGMHWFRQAPGKEREFV |
| NO: 390 | SGISWRGDSTGYADSVKGRFTISRDNAKNTVDLQMNSLKPEDTAIYYCA |
| | AAAGSHWYGTHYEYDYWGQGTQVTVSSGTGGGGSGGGGSGGGGSGG |
| | GGSLKEAKEKAIEELKKAGITSDYYFDLINKAKAVEGVNALKDEILKAG |
| | GGGSGGGGSGGGGSGGGGSREGCASHCTKYKAELEKCEARVSSRSNTE |
| | ETCVQELFDFLHCVDHCVSQ |

### Example 23

### Cooperative Binding of Selective Depletion Complexes for Cell-Specific Targeting

[0434] This example describes cooperative binding of selective depletion complexes for cell-specific targeting. Selective depletion complexes (SDCs) containing a target-binding peptide and a receptor-binding peptide and labeled with a His tag (SEQ ID NO: 228), as illustrated in FIG. 24A, as well as a control peptide that does not contain a high-affinity target-binding moiety but that does contain receptor-binding moiety and a His-tag, were tested for the ability to cooperatively bind to a target molecule and a receptor on a cell surface. Cells expressing TfR (PDL1 −, TfR +) or both PD-L1 and TfR (PDL1 +, TfR +) were incubated with peptide complexes capable of binding PD-L1 (PDL1 +, TfR −) both PD-L1 and TfR (PDL1 +, TfR +), or no peptide (PBS; PDL1 −, TfR −) and labeled with a fluorescent anti-His antibody. Fluorescence was used as a readout to measure binding of peptide complexes to cells. The SDC capable of binding both PD-L1 and TfR (SEQ ID NO: 356) cooperatively bound to cells expressing both PD-L1 and TfR, as indicated by high fluorescence shown in FIG. 24B. The same SDC showed significant but substantially lower binding to cells that expressed TfR but not PD-L1, as indicates by moderate fluorescence shown in FIG. 24B. Peptide complexes lacking the ability to bind TfR with high affinity but containing a PD-L1-binding domain (SEQ ID NO: 357) showed low binding to cells expressing TfR and PD-L1. Together, this data demonstrates that selective depletion complexes containing both a functional target-binding domain (e.g., a PD-L1-binding peptide) and a functional receptor-binding domain (e.g., a TfR-binding peptide) cooperatively bind to cells expressing both the target molecule and the receptor. The data also indicates that SDCs that contain a functional receptor-binding domain (e.g., a TfR-binding peptide), and a domain that binds a target that is not expressed on the cell surface (such as a soluble target), binds to cells that express the receptor.

### Example 24

### Designing Selective Depletion Complexes

[0435] This example describes designing selective depletion complexes to bind to and deplete a target molecule. Selective depletion complexes containing a target-binding peptide and a receptor-binding peptide are designed deplete a target molecule by binding to a receptor that is recycled via the endocytic pathway (e.g., TfR or PD-L1) and also binding the target molecule (e.g., PD-L1 or EGFR). One of the binding peptides in the SDC exhibits pH dependent binding (that is, higher binding to the target or receptor at extracellular pH than at endosomal/lysosomal pH). If the receptor is bound pH-independently (such as with similar binding at extracellular pH as at endosomal or lysosomal pH) and the target is bound with pH dependence, the SDC may be catalytic. If the receptor is bound with pH dependence and the target is bound with pH independence, the SDC may be non-catalytic. The receptor-binding peptide is complexed with the target-binding peptide by direct fusion through a linker or by dimerization through a dimerization domain. Examples of selective depletion complexes and comparator molecules are shown in FIG. 25A and FIG. 25B. The selective depletion complexes and complex components are assembled by connecting a target-binding peptide to a receptor-binding peptide through a linker or a dimerization domain. Examples of receptor-binding peptides include a TfR-binding CDP (SEQ ID NO: 96, “T”) or a TfR-binding single chain antibody (SEQ ID NO: 221, “N5”; or SEQ ID NO: 222, “M16”). SEQ ID NO: 96 and SEQ ID NO: 221 can bind TfR with pH independence and SEQ ID NO: 222 can bind TfR with pH dependence. Examples of target-binding peptides include an EGFR-binding nanobody (SEQ ID NO: 242, “G2”) with limited pH dependence, a pH-dependent EGFR-binding nanobody (SEQ ID NO: 243; “P”), a PD-L1-binding CDP with moderate pH dependence (SEQ ID NO: 187; solid dark circle), or a PD-L1-binding CDP with extreme pH dependence (SEQ ID NO: 233; solid light circle). Peptide linkers (e.g., SEQ ID NO: 129-SEQ ID NO: 141, SEQ ID NO: 194-SEQ ID NO: 218, SEQ ID NO: 223-SEQ ID NO: 227, or SEQ ID NO: 391) or dimerization domains (e.g., SEQ ID NO: 245-SEQ ID NO: 287) are used to link the target-binding peptide to the receptor-binding peptide in a single polypeptide chain, as seen in the first row of complexes, or to link the target-binding peptide or the receptor-binding peptide to a dimerization domain, as seen in the second row of complexes in FIG. 25A.

[0436] The dimerization domain can be an Fc homodimerization domain (e.g., any of SEQ ID NO: 245-SEQ ID NO: 259) or a knob-in-hole (KIH) Fc heterodimerization domain (e.g., SEQ ID NO: 260-SEQ ID NO: 287). To form heterodimers, SEQ ID NO: 260 dimerizes with SEQ ID NO: 261; SEQ ID NO: 262 dimerizes with SEQ ID NO: 263; SEQ ID NO: 264 dimerizes with SEQ ID NO: 265; SEQ ID NO: 266 dimerizes with SEQ ID NO: 267; SEQ ID NO: 268 dimerizes with SEQ ID NO: 269; SEQ ID NO: 270 dimerizes with SEQ ID NO: 271; SEQ ID NO: 272 dimerizes with SEQ ID NO: 273; SEQ ID NO: 274 dimerizes with SEQ ID NO: 275; SEQ ID NO: 276 dimerizes with SEQ ID NO: 277; SEQ ID NO: 278 dimerizes with SEQ ID NO: 279; SEQ ID NO: 280 dimerizes with SEQ ID NO: 281; SEQ ID NO: 282 dimerizes with SEQ ID NO: 283; SEQ ID NO: 284 dimerizes with SEQ ID NO: 285; and SEQ ID NO: 286 dimerizes with SEQ ID NO: 287. Components are mixed and matched to produce the preferred target-binding, receptor-binding, and valency properties.

[0437] Examples of monovalent selective depletion complexes are shown in FIG. 25A. Monovalent selective depletion complexes are designed as single polypeptide chains containing a target-binding peptide (e.g., SEQ ID NO: 242, “G2”; SEQ ID NO: 243, “P”; SEQ ID NO: 187, solid dark circle; or SEQ ID NO: 233, solid light circle) linked to a receptor-binding peptide (e.g., SEQ ID NO: 96, “T”; SEQ ID NO: 221, “N5”; or SEQ ID NO: 222, “M16”) via a linker (e.g., SEQ ID NO: 129-SEQ ID NO: 141, SEQ ID NO: 194-SEQ ID NO: 218, SEQ ID NO: 223-SEQ ID NO: 227, or SEQ ID NO: 391). Alternatively, monovalent selective depletion complexes are designed as a polypeptide containing a target-binding peptide heterodimerized with a polypeptide containing a receptor-binding polypeptide via complementary heterodimerization domains (e.g., a KIH heterodimerization pair selected from SEQ ID NO: 260-SEQ ID NO: 287).

[0438] The target:SDC:receptor complex is trafficked to the endosome, where the pH is progressively lowered (such as in an early endosome, late endosome, and lysosome). At the lower pH, a pH-dependent binding end of the SDC may no longer bind to the target or receptor. Representative catalytic active molecules may bind to TfR in a pH-independent fashion (e.g., using SEQ ID NO: 96 or SEQ ID NO: 221) and to the target in a pH-dependent fashion (e.g., using SEQ ID NO: 243, SEQ ID NO: 187, SEQ ID NO: 233, or SEQ ID NO: 234) and will therefore remain bound to TfR but release target in the low-pH endosome. The target may be trafficked to a lysosome and degraded. TfR is recycled back to the cell surface, bringing the catalytic active SDC molecule with it. Non-catalytic active molecules may bind to TfR in a pH-dependent fashion (e.g., using SEQ ID NO: 222) and to the target in a pH-independent fashion (e.g., using SEQ ID NO: 242) and will therefore release from TfR and remain bound to the target in low pH conditions. The target and the SDC may then both be subject to endosomal/lysosomal degradation. Control molecules may be designed whose binding to both TfR (e.g., using SEQ ID NO: 96 or SEQ ID NO: 221) and to target (e.g., using SEQ ID NO: 242) is pH-independent, and these molecules may not release target in the low pH endosome and therefore may not facilitate target degradation.

[0439] Examples of bivalent selective depletion complexes are shown in FIG. 25B. These examples only show one example TfR-binding moiety (SEQ ID NO: 96) and one example target-binding moiety (SEQ ID NO: 243), but the concept may be applied to any TfR-binding moiety or any target-binding moiety and may be subject to the same expectations for catalytic activity, non-catalytic activity, or comparator complex behavior based on pH-dependence as demonstrated in FIG. 25A. A bivalent selective depletion complex contains one or two target-binding peptides and one or two receptor-binding peptides. Bivalent selective depletion complexes are designed as homodimers or heterodimers containing one or more target-binding peptides (e.g., SEQ ID NO: 243, “P”; or SEQ ID NO: 242, SEQ ID NO: 187, SEQ ID NO: 233, or SEQ ID NO: 234 (not shown)) linked to one or more receptor-binding peptide (e.g., SEQ ID NO: 96, “T”; or SEQ ID NO: 221, “or SEQ ID NO: 222, (not shown)) through one or more linkers (e.g., SEQ ID NO: 129-SEQ ID NO: 141, SEQ ID NO: 194-SEQ ID NO: 218, SEQ ID NO: 223-SEQ ID NO: 227, or SEQ ID NO: 391) and/or a homodimerization domain (e.g., any of SEQ ID NO: 245-SEQ ID NO: 259) or a heterodimerization domain pair (e.g., a KIH heterodimerization pair selected from SEQ ID NO: 260-SEQ ID NO: 287). Alternatively, bivalent selective depletion complexes are designed as a single polypeptide chain containing one or two target-binding peptides and one or two receptor-binding peptides connected via a linker. Higher valence SDCs can also be designed. SDCs that are bivalent or multivalent may exhibit increased binding due to cooperativity, which may increase the potency or function of the molecule for target protein degradation. For example, if the receptor-binding peptide has a fairly rapid off rate, an SDC that is bivalent for binding the receptor may increase the ability of the SDC to bind the cell and may also increase the ability of the SDC to remain bound to the receptor during the trafficking of the receptor back to the cell surface. An SDC can have 1, 2, 3, 4, 5 or more target-binding peptides and 1, 2, 3, 4, 5 or more receptor-binding peptides. An IgM, polymer, or dendritic scaffold may be used to multimerize the SDC.

[0440] While selective depletion complexes in FIG. 25A and FIG. 25B are shown with the receptor-binding peptide positioned toward the N-terminus of the complex and the target-binding peptide positioned toward the C-terminus, complexes may be arranged with the target-binding peptide toward the N-terminus and the receptor-binding peptide toward the C-terminus. Additionally, selective depletion complexes may be designed as multivalent complexes containing three or more target-binding peptides and/or three or more receptor-binding peptides.

### Example 25

### Selective Depletion of PD-L1 Using a Selective Depletion Complex

[0441] This example describes selective depletion of PD-L1 using a selective depletion complex. A selective depletion complex containing a pH-dependent PD-L1-binding peptide of SEQ ID NO: 233 or SEQ ID NO: 234 and a TfR-binding peptide of SEQ ID NO: 96 or SEQ ID NO: 221 is contacted to a cell expressing TfR and PD-L1. The selective depletion complex cooperatively binds to TfR via the TfR-binding peptide and to PD-L1 via the PD-L1-binding peptide, forming a ternary complex on the cell surface. The TfR is endocytosed along with the bound selective depletion complex and PD-L1. Upon acidification during endosomal/lysosomal maturation, the selective depletion complex releases the PD-L1 and remains bound to the TfR. The PD-L1 is degraded in the lysosome, thereby selectively depleting the PD-L1. The TfR and selective depletion complex are recycled to the cell surface.

[0442] The selective depletion complex is SEQ ID NO: 290, SEQ ID NO: 291, SEQ ID NO: 308, SEQ ID NO: 317, SEQ ID NO: 318, SEQ ID NO: 322, SEQ ID NO: 323; or the selective depletion complex is SEQ ID NO: 292, SEQ ID NO: 294, SEQ ID NO: 315, SEQ ID NO: 316, heterodimerized with SEQ ID NO: 304, SEQ ID NO: 306, SEQ ID NO: 319, SEQ ID NO: 320, SEQ ID NO: 321, SEQ ID NO: 324, or SEQ ID NO: 325; or the selective depletion complex is SEQ ID NO: 295 or SEQ ID NO: 297, heterodimerized with SEQ ID NO: 304, SEQ ID NO: 319, SEQ ID NO: 321, or SEQ ID NO: 324; or the selective depletion complex is SEQ ID NO: 298 or SEQ ID NO: 300, heterodimerized with SEQ ID NO: 303; or the selective depletion complex is SEQ ID NO: 326, heterodimerized with SEQ ID NO: 306, SEQ ID NO: 311, SEQ ID NO: 320 or SEQ ID NO: 325.

### Example 26

### Treatment of Cancer by Selectively Depleting PD-L1

[0443] This example describes treatment of cancer by selectively depleting PD-L1. A selective depletion complex containing a pH-dependent PD-L1-binding peptide of SEQ ID NO: 233 or SEQ ID NO: 234 and a TfR-binding peptide, such as that of SEQ ID NO: 96 or SEQ ID NO: 221, is administered to a subject having a PD-L1 positive cancer. The selective depletion complex binds to PD-L1 and TfR on the surface of a cancer cell, and the ternary complex of the selective depletion complex, PD-L1, and TfR is endocytosed. The PD-L1 is released upon acidification in the endosome and degraded, thereby depleting PD-L1. The TfR and selective depletion complex are recycled to the cell surface. Depletion of PD-L1 inhibits evasion of the host immune response by the cancer cell and increases apoptosis of the cancer cell, thereby treating the cancer.

### Example 27

### Selective Depletion of EGFR Using a Selective Depletion Complex

[0444] This example describes selective depletion of EGFR using a selective depletion complex. A selective depletion complex containing a pH-dependent EGFR-binding peptide of SEQ ID NO: 242, SEQ ID NO: 243 or SEQ ID NO: 244 and a TfR-binding peptide of SEQ ID NO: 96, SEQ ID NO: 221, or SEQ ID NO: 222 in any combination of TfR-binding valence (e.g. monovalent, bivalent, or greater) and EGFR-binding valence (e.g. monovalent, bivalent, or greater) is contacted to a cell expressing TfR and EGFR. The selective depletion complex cooperatively binds to TfR via the TfR-binding peptide and to EGFR via the EGFR-binding peptide, forming a ternary complex on the cell surface. The TfR is endocytosed along with the bound selective depletion complex and EGFR. Upon acidification in the endosome, the selective depletion complex releases the EGFR and remains bound to the TfR. The EGFR is degraded in the endosome/lysosome, thereby selectively depleting the EGFR. The TfR and selective depletion complex are recycled to the cell surface. Activation of EGFR and downstream pathways such as KRAS and MEK may be reduced. Binding to the cell surface, endosomal uptake, trafficking, degradation, and pathway activation can be detected using flow cytometry, fluorescent microscopy, Western blotting, ELISA, histology, IHC, or other methods. These can be monitored after in vitro or in vivo exposure of EGFR-expressing cells.

[0445] The selective depletion complex is SEQ ID NO: 288, SEQ ID NO: 289, SEQ ID NO: 307, SEQ ID NO: 313, SEQ ID NO: 327, SEQ ID NO: 328, SEQ ID NO: 332, SEQ ID NO: 333, SEQ ID NO: 337, SEQ ID NO: 338, SEQ ID NO: 342, or SEQ ID NO: 343; or the selective depletion complex is SEQ ID NO: 292, SEQ ID NO: 293, SEQ ID NO: 310, SEQ ID NO: 315, SEQ ID NO: 316 heterodimerized with SEQ ID NO: 302; SEQ ID NO: 305, SEQ ID NO: 339, SEQ ID NO: 340; SEQ ID NO: 344; SEQ ID NO: 345; or the selective depletion complex is SEQ ID NO: 296 heterodimerized with SEQ ID NO: 302, SEQ ID NO: 339, or SEQ ID NO: 344; or the selective depletion complex is SEQ ID NO: 298 or SEQ ID NO: 299 heterodimerized with SEQ ID NO: 301; or the selective depletion complex is SEQ ID NO: 331 or SEQ ID NO: 336 heterodimerized with SEQ ID NO: 330 or SEQ ID NO: 335; or the selective depletion complex is SEQ ID NO: 292, SEQ ID NO: 315, or SEQ ID NO: 316 heterodimerized with SEQ ID NO: 329, SEQ ID NO: 330, SEQ ID NO: 334, or SEQ ID NO: 335.

[0446] Similar methods and designs can be used for selective depletion complexes containing a PD-L1-binding domain (e.g., a PD-L1-binding peptide) rather than a TfR-binding domain the as the recycling receptor, in methods where PD-L1 is used as the recycling receptor. For Example, EGFR can similarly be depleted as described by use of a selective depletion complex that comprises a PD-L1-binding moiety and an EGFR-binding moiety where at least one moiety binds with a lower affinity at endosomal pH than at extracellular pH.

### Example 28

### Treatment of Cancer by Selectively Depleting EGFR

[0447] This example describes treatment of cancer by selectively depleting EGFR. A selective depletion complex containing a pH-dependent EGFR-binding peptide, such as that of SEQ ID NO: 243 or SEQ ID NO: 244, and a TfR-binding peptide, such as that of SEQ ID NO: 96, is administered to a subject having an EGFR positive cancer. The subject may be a human, a non-human primate, a mouse, a rat, or another species. A selective depletion complex may be administered subcutaneously, intravenously, intramuscularly, interperitoneally, or by another route. It may be administered 1, 2, 3, 4, 5, 10, or more times and at a frequency of 1, 2, 3, 4, 5, 6, or 7 times per week or every other week or every third week, or monthly or less frequently. The EGFR positive cancer is non-small-cell lung cancer, head and neck cancer, glioblastoma, metastatic brain cancer, colorectal cancer, TKI-resistant cancer, cetuximab-resistant cancer, necitumumab-resistant cancer, or panitumumab-resistant cancer. The selective depletion complex binds to EGFR and TfR on the surface of an EGFR positive cancer cell, and the ternary complex of the selective depletion complex, EGFR, and TfR is endocytosed. The EGFR is released upon acidification in the endosome and degraded, thereby depleting EGFR. The TfR and selective depletion complex are recycled to the cell surface. Depletion of EGFR reduces pro-growth signaling in the cancer cell, slowing cancer growth or metastases, thereby treating the cancer. Optionally, because the selective depletion complex targets cells that express both EGFR and TfR, the skin toxicity caused by the selective complex is less than the skin toxicity caused by anti-EGFR antibody or tyrosine kinase inhibitor therapy, which inhibit EGFR without TfR tissue targeting.

[0448] Cancers may also be similarly treated by using a selective depletion complex that binds both PD-L1 and EGFR.

### Example 29

### Selective Depletion of TNFα Using a Selective Depletion Complex

[0449] This example describes selective depletion of TNFα using a selective depletion complex. A selective depletion complex containing a pH-dependent TNFα-binding peptide of and a TfR-binding peptide, such as that of SEQ ID NO: 96, is contacted to a cell expressing TfR where there is TNFα present, such as in the extracellular fluid, serum, on the cell surface, or in the cell culture media. The selective depletion complex cooperatively binds to TfR via the TfR-binding peptide and to TNFα via the TNFα-binding peptide, forming a ternary complex on the cell surface. The TfR is endocytosed along with the bound selective depletion complex and TNFα. Upon acidification in the endosome, the selective depletion complex releases the TNFα and remains bound to the TfR. The TNFα is degraded in the endosome/lysosome, thereby selectively depleting the TNFα. The TfR and selective depletion complex are recycled to the cell surface.

### Example 30

### Treatment of a CNS Inflammatory Disorder by Selectively Depleting TNFα

[0450] This example describes treatment of a CNS inflammatory disorder by selectively depleting TNFα. A selective depletion complex containing a pH-dependent TNFα-binding peptide and a TfR-binding peptide of SEQ ID NO: 96 is administered to a subject having a disorder in the CNS that involves inflammation. The CNS inflammatory disorder is optionally neuroinflammation, stroke, traumatic brain injury, Alzheimer's disease, or a tauopathy. The SDC crosses the BBB, thereby contacting cells and molecules within the subjects CNS. The SDC may be transported across the BBB via binding transferrin and undergoing transcytosis. The selective depletion complex binds to TfR on the surface of a cell and also to TNFα, and the ternary complex of the selective depletion complex, TNFα, and TfR is endocytosed. The TNFα is released upon acidification in the endosome and degraded, thereby depleting TNFα. The TfR and selective depletion complex are recycled to the cell surface. Depletion of TNFα reduces cytokine signaling in the CNS, reducing neuroinflammation, thereby treating the CNS inflammatory disorder.

### Example 31

### Selective Depletion of CD47 Using a Selective Depletion Complex

[0451] This example describes selective depletion of CD47 using a selective depletion complex. A selective depletion complex containing a TfR-binding peptide and a CD47-binding peptide, where one of the binding peptides is pH-dependent in its binding and the other binding peptide is pH-independent in its binding, is contacted to a cell expressing TfR and CD47. The selective depletion complex cooperatively binds to TfR via the TfR-binding peptide and to CD47 via the CD47-binding peptide, forming a ternary complex on the cell surface. The TfR is endocytosed along with the bound selective depletion complex and CD47. Upon acidification in the endosome, the selective depletion complex releases the CD47 and remains bound to the TfR or the SDC released the TfR and remains bound to the CD47. The CD47 is degraded in the endosome/lysosome, thereby selectively depleting the CD47.

### Example 32

### Treatment of Cancer by Selectively Depleting CD47

[0452] This example describes treatment of cancer by selectively depleting CD47. A selective depletion complex containing a TfR-binding peptide and a CD47-binding peptide, such as that described in EXAMPLE 31, is administered to a subject having a CD47 positive cancer. The selective depletion complex binds at low or no amount to mature red blood cells because mature red blood cells do not express TfR, resulting in preferential binding to cancer cells as compared to red blood cells. The selective depletion complex binds to CD47 and TfR on the surface of a cancer cell, and the ternary complex formed from the selective depletion complex, CD47, and TfR is endocytosed. The CD47 is trafficked to the endosome/lysosome and degraded, thereby depleting CD47. The cell is depleted of CD47, eliminating an immuno-suppressive or anti-apoptotic signal from the cell. Depletion of CD47 inhibits evasion of the host immune response by the cancer cell and allows response to various pro-apoptotic signals which increase immune cell attack of or apoptosis of the cancer cell, thereby treating the cancer.

[0453] Treatment of a cancer in a first subject with a selective depletion complex that targets and depletes CD47 is compared to treatment of a cancer in a second subject by administering an antibody that binds CD47. The antibody binds to all cells that expressed CD47, including red blood cells. Aging red blood cells in the second subject treated with the anti-CD47 antibody also display pro-apoptotic signals, thus once the CD47 is depleted from the aging red blood cell surface, the aging red blood cells are targeted and removed by the immune system, and the second subject is depleted of red blood cells and becomes anemic. Since the selective depletion complex does not bind to red blood cells, the CD47 is not reduced on the red blood cells of the first subject. Thus, the first subject that is treated with the selective depletion complex of this example does not develop anemia.

### Example 33

### Treatment of Cancer by Selectively Depleting CD39

[0454] This example describes treatment of cancer by selectively depleting CD39. CD39 is a cell surface ectoenzyme that degrades ATP to AMP; CD73 then processes AMP to adenosine, which is immunosuppressive, whereas ATP can activate macrophages to secrete IL-1ß and IL-18 which activate T cells. A selective depletion complex (SDC) containing a TfR-binding peptide and a CD39-binding peptide is administered to a subject having a CD39 positive cancer. The SDC causes removal of CD39 from the cell surface. The cell is depleted of CD39, thereby inhibiting conversion of ATP to AMP. The resulting tumor microenvironment contains more ATP and less adenosine than the tumor microenvironment prior to treatment with the SDC. The tumor microenvironment becomes more inflammatory and less immunosuppressed, leading to enhanced targeting of the cancer cells by the immune system and for apoptosis, thereby treating the cancer. The SDC causes the CD39 to be removed from the cell surface at a rate much faster than the rate of regeneration of CD39, leading to extended depletion of CD39 and sustained reduction of ATP processing to adenosine.

[0455] Treatment of a cancer in a first subject with a selective depletion complex that targets and depletes CD39 is compared to treatment of a cancer in a second subject by administering an antibody that binds CD39. The concentration of antibody in the second subject's circulation varies over the dosing intervals such that CD39 is not fully occupied by the antibody at all times. Low occupancy of CD39 by the anti-CD39 antibody in the second subject results in less adenosine depletion in the second subject compared to the first subject treated with the SDC due to constant activity of the CD39 enzyme in the second subject. The antibody also binds to CD39 on the red blood cells of the second subject, causing anemia. The SDC does not deplete CD39 from red blood cells in the first subject because the mature red blood cells do not express TfR. As a result, the CD39 is not reduced on the red blood cells of the first subject. Thus, the first subject that is treated with the selective depletion complex of this example does not develop anemia.

### Example 34

### Selective Depletion of a Soluble Target Molecule Via PD-L1-Mediated Endocytosis

[0456] This example describes selective depletion of a soluble target molecule via PD-L1-mediated endocytosis. A selective depletion complex (SDC) containing a PD-L1-binding peptide (e.g., any one of SEQ ID NO: 187, SEQ ID NO: 236, SEQ ID NO: 400, or SEQ ID NO: 401) with PD-L1-binding at endosomal pH conjugated to a target-binding peptide is contacted to cells expressing PD-L1. The PD-L1-binding peptide binds PD-L1 at both physiologic extracellular pH (such as pH 7.4) and at endosomal pH (such as pH 5.5), and the target-binding peptide binds to a soluble target molecule with higher affinity at physiologic extracellular pH and with lower affinity at endosomal pH. Upon contact, the PD-L1-binding peptide binds to PD-L1 on the cell surface, and the target-binding peptide binds to the soluble target molecule in solution. The PD-L1-binding SDC undergoes the same recycling process illustrated in FIG. 12A, where “TfR-binding CDP (pH-independent)” and “TfR (Recycling)” are substituted with “PD-L1-binding CDP (pH-independent)” and “PD-L1 (Recycling),” respectively. The SDC binds to the soluble target molecule, as illustrated in FIG. 12A (1). The complex formed from the SDC, PD-L1, and the target molecule is endocytosed via PD-L1-mediated endocytosis as illustrated in FIG. 12A (2). As the endosomal compartment acidifies, the target molecule is released from the target-binding peptide, as illustrated in FIG. 12A (3). The target molecule is then degraded in a lysosomal compartment, as illustrated in FIG. 12A (4), and the complex is recycled to the cell surface along with the PD-L1, as illustrated in FIG. 12A (5).

### Example 35

### Selective Depletion of a Surface Target Molecule Via PD-L1-Mediated Endocytosis

[0457] This example describes selective depletion of a surface target molecule via PD-L1-mediated endocytosis. A selective depletion complex (SDC) containing a PD-L1-binding peptide (e.g., any one of any one of SEQ ID NO: 187, SEQ ID NO: 235-SEQ ID NO: 239, SEQ ID NO: 400, or SEQ ID NO: 401) with PD-L1-binding at endosomal pH conjugated to a target-binding peptide is contacted to cells expressing PD-L1. The PD-L1-binding peptide binds PD-L1 at both physiologic extracellular pH (such as at pH 7.4) and at endosomal pH (such as at pH 5.5), and the target-binding peptide binds to a surface target molecule with higher affinity at physiologic extracellular pH and with lower affinity at endosomal pH. Upon contact, the PD-L1-binding peptide binds to PD-L1 on the cell surface, and the target-binding peptide binds to the target molecule on the cell surface. The PD-L1-binding SDC undergoes the same recycling process illustrated in FIG. 12B, where “TfR-binding CDP (pH-independent)” and “TfR (Recycling)” are substituted with “PD-L1-binding CDP (pH-independent)” and “PD-L1 (Recycling),” respectively. The SDC binds to the cell surface target molecule, as illustrated in FIG. 12B (1). The complex formed from the SDC, PD-L1, and the target molecule is endocytosed via PD-L1-mediated endocytosis as illustrated in FIG. 12B (2). As the endosomal compartment acidifies, the target molecule is released from the target-binding peptide, as illustrated in FIG. 12B (3). The target molecule is then degraded in a lysosomal compartment, as illustrated in FIG. 12B (4), and the complex is recycled to the cell surface along with the PD-L1, as illustrated in FIG. 12B (5).

### Example 36

### Selective Depletion of HLA-G Using a PD-L1-Binding Selective Depletion Complex

[0458] This example describes selective depletion of HLA-G using a selective depletion complex that binds PD-L1. A selective depletion complex (SDC) containing a PD-L1-binding peptide and an HLA-G-binding peptide, is constructed. Optionally, PD-L1 binding peptide, such as a PD-L1-binding peptide of SEQ ID NO: 187, SEQ ID NO: 236, SEQ ID NO: 400, or SEQ ID NO: 401, binds PD-L1 at both extracellular and endosomal pH, and the HLA-G-binding peptide binds HLA-G with high affinity at extracellular pH and lower affinity at endosomal pH. Alternatively, the PD-L1 binding peptide, such as a PD-L1-binding peptide of SEQ ID NO: 233 or SEQ ID NO: 234, binds PD-L1 at extracellular pH and lower affinity at endosomal pH, and the HLA-G-binding peptide binds HLA-G with high affinity at both extracellular and endosomal pH. The SDC of this example is contacted to a cancer cell. The SDC binds PD-L1 and HLA-G expressed on the surface of the cancer cell, forming a ternary complex. The SDC is endocytosed along with the PD-L1 and the HLA-G. If the HLA-G-binding peptide binds HLA-G with high affinity at extracellular pH and lower affinity at endosomal pH, the SDC releases the HLA-G upon acidification of the endosome and the HLA-G is targeted to the endosomal/lysosomal system for degradation. If the PD-L1-binding peptide binds PD-L1 with high affinity at both extracellular and endosomal pH, the SDC is recycled back to the cell surface, where it may bind another HLA-G for degradation. If the PD-L1 binding peptide binds PD-L1 with high affinity at extracellular pH and lower affinity at endosomal pH, the SDC releases the PD-L1 upon acidification of the endosome, and the HLA-G and the SDC may be trafficked to the endosomal/lysosomal system. The PD-L1 may be recycled back to the cell surface.

### Example 37

### Structure of a High-Affinity PD-L1-Binding Cystine Dense Peptide

[0459] This example describes the structure of a high-affinity PD-L1-binding cystine dense peptide. A PD-L1-binding CDP (SEQ ID NO: 187) was co-crystalized with PD-L1 to confirm the CDP binding site and visualize the surface interactions with PD-L1, as shown in FIG. 26A. SEQ ID NO: 187, a variant that eliminated a canonical N-linked glycosite acquired during affinity maturation, was produced as a soluble molecule as described in EXAMPLE 1 and was co-crystalized with PD-L1. A portion of the CDP, from A19 through Q35, was unresolved in the 2.0 Å structure. Enrichment analysis was performed to determine the impact of amino acid substitutions at residues that were resolved in the crystal structure relative to residues that were unresolved in the crystal structure. The average SSM enrichment scores of unresolved residues were less extreme (deviated less from 0) than seen with resolved residues, as shown in FIG. 26B, showing the specific side chain identities of unresolved residues were less important to high affinity binding. The portion that did resolve matched the model from E1 through C18 and from D38 through A48. K36 and F37 resolved but were not part of the D38-A48 helix.

[0460] The resolved portion had an interface surface area of 620 Å² as assessed by PISA (PDBe PISA v1.52), which was similar to the observed interface surface area of PD-L1 with PD-1 (622 Å², PDB 4ZQK). The CDP's location on PD-L1 fell squarely within both the PD-1 occupancy space, as shown in FIG. 26C, showing the in silico low-resolution docking enrichment was predictive of the interface of this hit. A closer look at the interface, shown in FIG. 26D and in FIG. 26G, revealed that the CDP makes use of many of the same interaction sites as PD-1. Both K5 of SEQ ID NO: 187 and K78 of PD-1 made a salt bridge with the A121 backbone oxygen of PD-L1, while both D44 of SEQ ID NO: 187 and E136 of PD-1 similarly formed a salt bridge with Y123 of PD-L1. F40 of SEQ ID NO: 187 sat in pocket formed by Y56, R113, M115, and Y123 of PD-L1, making hydrophobic contacts (M115), herringbone ring stacking interactions (two Y's), and a cation-pi interaction (R113). This pocket was also occupied by I134 of PD-1. Furthermore, V9, W12, and L43 of SEQ ID NO: 187 also shared sites of hydrophobic interactions used by L128, A132, and I126 of PD-1, respectively. The interface-adjacent mutations that differentiated SEQ ID NO: 187 from its parental scaffold would be expected to disrupt binding when reverted to the parental side chains, as illustrated in FIG. 26E. The hydrophobic interactions of both M13 and L43 with the surface of PD-L1 would be lost in the parental A13 and V43; the pocket occupied by F40 would have to distort to accommodate the parental W40, altering the interface elsewhere; and parental F39 does not neatly fit against the surface as V39 does. Finally, analysis of the human/mouse and human/cynomolgus monkey (cyno) homology on the PD-L1 surface revealed that the interaction site contained several non-homologous side chains between human and mice, as shown in FIG. 26F.

[0461] While preferred embodiments of the present invention have been shown and described herein, it will be apparent to those skilled in the art that such embodiments are provided by way of example only. Numerous variations, changes, and substitutions will now occur to those skilled in the art without departing from the invention. It should be understood that various alternatives to the embodiments of the invention described herein can be employed in practicing the invention. It is intended that the following claims define the scope of the invention and that methods and structures within the scope of these claims and their equivalents be covered thereby.

1-164. (canceled)

165. A peptide complex comprising:
a transferrin receptor-binding peptide; and
a target-binding peptide complexed with the transferrin receptor-binding peptide, wherein the target-binding peptide has a target-binding affinity for a target that is lower in an endosome than in an extracellular environment.

166. The peptide complex of claim 165, wherein the target is an extracellular protein, a secreted peptide, a secreted protein, a circulating protein, a soluble protein, a cell surface protein, or a transmembrane protein.

167. The peptide complex of claim 165, wherein the transferrin receptor-binding peptide, the target-binding peptide, or both comprises a miniprotein, a nanobody, an antibody, an antibody fragment, an scFv, a DARPin, or an affibody.

168. The peptide complex of claim 167, wherein the miniprotein comprises a cystine-dense peptide, an affitin, an adnectin, an avimer, a Kunitz domain, a nanofittin, a fynomer, a bicyclic peptide, a beta-hairpin, or a stapled peptide.

169. The peptide complex of claim 165, wherein the transferrin receptor-binding peptide comprises a cystine-dense peptide comprising at least three disulfide bonds.

170. The peptide complex of claim 165, wherein the transferrin receptor-binding peptide comprises a sequence of SEQ ID NO: 170.

171. The peptide complex of claim 165, wherein the transferrin receptor-binding peptide comprises a sequence having at least 90% sequence identity to any one of SEQ ID NO: 96, SEQ ID NO: 65-SEQ ID NO: 95, SEQ ID NO: 97-SEQ ID NO: 128, SEQ ID NO: 220-SEQ ID NO: 222, or SEQ ID NO: 1-SEQ ID NO: 64, or wherein the transferrin receptor-binding peptide comprises a sequence having at least 90% sequence identity to a fragment of any one of SEQ ID NO: 96, SEQ ID NO: 65-SEQ ID NO: 95, SEQ ID NO: 97-SEQ ID NO: 128, SEQ ID NO: 220-SEQ ID NO: 222, or SEQ ID NO: 1-SEQ ID NO: 64.

172. The peptide complex of claim 165, wherein the transferrin receptor-binding peptide comprises a sequence of SEQ ID NO: 96, SEQ ID NO: 66, SEQ ID NO: 220, SEQ ID NO: 221, or SEQ ID NO: 222.

173. The peptide complex of claim 165, wherein the target-binding affinity of the target-binding peptide is at least 2-fold greater at pH 7.4 than at pH 5.5.

174. The peptide complex of claim 165, wherein the target-binding affinity of the target-binding peptide at pH 5.5 is lower than a transferrin receptor-binding affinity of the transferrin receptor-binding peptide for a transferrin receptor at pH 5.5.

175. The peptide complex of claim 165, wherein the target is a growth factor receptor, a receptor tyrosine kinase, a cell signaling molecule, an extracellular matrix macromolecule, a neurotransmitter, a cytokine, a growth factor, a tumor associated antigen, a tumor specific antigen, a hormone, a checkpoint inhibitor, an immune checkpoint inhibitor, an inhibitory immune receptor, a ligand of an inhibitory immune receptor, a macrophage surface protein, a lipopolysaccharide, an antibody, an inhibitory immune receptor, a tumor associated antigen, a tumor specific antigen, or an autoantibody.

176. The peptide complex of claim 165, wherein the target is collagen, elastin, a microfibrillar protein, a proteoglycan, CD200R, CD300a, CD300f, CEACAM1, FcgRiib, ILT-2, ILT-3, ILT-4, ILT-5, LAIR-1, PECAM-1, PILR-alpha, SIRL-1, and SIRP-alpha, CLEC4A, Ly49Q, MIC, CD3, CD47, CD28, CD137, CD89, CD14, CD16, CD29, CD44, CD71, CD73, CD90, CD105, CD166, CD27, CD39, CD24, CD25, CD74, CD40L, MUC1, MUC16, MUC2, MUCSAC, MUC4, OX40, 4-1BB, HLA-G, LAG3, Tim3, TIGIT, GITR, TCR, TNF-α, EGFR, EGFRvIII, TKI-resistant EGFR, HER2, ERBB3, PDGFR, FGF, VEGF, VEGFR, IGFR1, CTLA4, STRO1, complement factor C4, complement factor C1q, complement factor C1s, complement factor C1r, complement factor C3, complement factor C3a, complement factor C3b, complement factor C5, complement factor C5a, TGFβ, PCSK9, P2Y6, HER3, RANK, tau, amyloid β, huntingtin, α-synuclein, glucocerebrosidase, α-glucosidase, apolipoprotein E4, IL-1, IL-1R, IL-1α, IL-1β, IL-2, IL-2R, IL-4, IL-5, IL-6, IL-6R, IL-10, IL-10R, IL-17, IL-23, IL-12, p40, a member of the B7 family, c-Met, SIGLEC, MCP-1, an MHC, an MHC I, an MHC II, PD-1, or PD-L1.

177. The peptide complex of claim 165, wherein the target is EGFR, EGFRvIII, PD-L1, IL-1R, IL-1β, c-Met, FGFR-1, ERBB3, HER2, AXL receptor, CD44, IGF1R, MUC1, PDGFR, CD47, CD73, CD30, VEGFR, VEGFR2, complement factor C4, tau, amyloid ß, α-synuclein, PCSK9, or TNFα.

178. The peptide complex of claim 165, wherein the target-binding peptide comprises a sequence having at least 90% sequence identity to SEQ ID NO: 187, SEQ ID NO: 233, SEQ ID NO: 242, SEQ ID NO: 243, SEQ ID NO: 219, SEQ ID NO: 244, SEQ ID NO: 234, SEQ ID NO: 235-SEQ ID NO: 239, SEQ ID NO: 400-SEQ ID NO: 456, or SEQ ID NO: 240.

179. The peptide complex of claim 165, wherein the target-binding peptide comprises one or more histidine residues at a target-binding interface.

180. The peptide complex of claim 165, wherein the transferrin receptor-binding peptide and the target-binding peptide form a single polypeptide chain.

181. The peptide complex of claim 165, wherein the peptide complex comprises a dimer dimerized via a dimerization domain.

182. The peptide complex of claim 181, wherein the dimerization domain comprises an Fc domain, a homodimerization domain, a first heterodimerization domain, a second heterodimerization domain, or combinations thereof.

183. The peptide complex of claim 182, wherein the homodimerization domain comprises a sequence that has at least 90% sequence identity with any one of SEQ ID NO: 245-SEQ ID NO: 259.

184. The peptide complex of claim 182, wherein the first heterodimerization domain comprises a sequence that has at least 90% sequence identity with any one of SEQ ID NO: 260, SEQ ID NO: 262, SEQ ID NO: 264, SEQ ID NO: 266, SEQ ID NO: 268, SEQ ID NO: 270, SEQ ID NO: 272, SEQ ID NO: 274, SEQ ID NO: 276, SEQ ID NO: 278, SEQ ID NO: 280, SEQ ID NO: 282, SEQ ID NO: 284, or SEQ ID NO: 286.

185. The peptide complex of claim 182, wherein the second heterodimerization domain comprises a sequence that has at least 90% sequence identity with any one of SEQ ID NO: 261, SEQ ID NO: 263, SEQ ID NO: 265, SEQ ID NO: 267, SEQ ID NO: 269, SEQ ID NO: 271, SEQ ID NO: 273, SEQ ID NO: 275, SEQ ID NO: 277, SEQ ID NO: 279, SEQ ID NO: 281, SEQ ID NO: 283, SEQ ID NO: 285, or SEQ ID NO: 287.

186. The peptide complex of claim 165, comprising a sequence that has at least 90% sequence identity with any one of SEQ ID NO: 288-SEQ ID NO: 313 or SEQ ID NO: 315-SEQ ID NO: 346.

187. A method of delivering a target molecule to an endosome, the method comprising:
contacting a peptide complex to a cell expressing a transferrin receptor, wherein the peptide complex comprises:
a transferrin receptor-binding peptide, and
a target-binding peptide complexed with the transferrin receptor-binding peptide;
binding the target-binding peptide to the target molecule under extracellular conditions;
binding the transferrin receptor-binding peptide to the transferrin receptor under extracellular conditions;
endocytosing the peptide complex, the target molecule, and the transferrin receptor; and
unbinding the target-binding peptide from the target molecule under endosomal conditions, thereby delivering the target molecule to the endosome.

188. The method of claim 187, wherein the target molecule is an extracellular protein, a secreted peptide, a secreted protein, a circulating protein, a soluble protein, a cell surface protein, or a transmembrane protein.

189. The method of claim 187, further comprising degrading the target molecule in an endocytic or lysosomal compartment.

190. The method of claim 187, further comprising recycling the peptide complex and the transferrin receptor.

191. The method of claim 189, further comprising depleting the target molecule.

192. A method of treating a disease or condition in a subject, the method comprising:
administering to the subject a peptide complex comprising a transferrin receptor-binding peptide and a target-binding peptide complexed with the transferrin receptor-binding peptide;
binding the target-binding peptide under extracellular conditions to a target molecule associated with the disease or condition on a cell of the subject expressing the target molecule and a transferrin receptor;
binding the transferrin receptor-binding peptide under extracellular conditions to the transferrin receptor on the cell of the subject; and
endocytosing the peptide complex, the target molecule, and the transferrin receptor;
unbinding the target-binding peptide from the target molecule, the transferrin receptor-binding peptide from the transferrin receptor, or both under endosomal conditions, thereby treating the disease or condition.

193. The method of claim 192, wherein the target molecule is an extracellular protein, a secreted peptide, a secreted protein, a circulating protein, a soluble protein, a cell surface protein, or a transmembrane protein.

194. The method of claim 192, further comprising degrading the target molecule in an endocytic or lysosomal compartment.

195. The method of claim 194, further comprising depleting the target molecule.

196. The method of claim 192, wherein the disease or condition is a cancer, a neurodegenerative disease, a lysosomal storage disease, an inflammatory disease, an autoimmune disease, a neuroinflammatory disease, an immune disease, or pain.

197. The method of claim 196, wherein the cancer is breast cancer, liver cancer, colon cancer, brain cancer, leukemia, lymphoma, non-Hodgkin lymphoma, myeloma, blood-cell-derived cancer, lung cancer, sarcoma, stomach cancer, a gastrointestinal cancer, glioblastoma, head and neck cancer, non-small-cell lung cancer, squamous non-small cell lung cancer, pancreatic cancer, ovarian cancer, blood cancer, skin cancer, liver cancer, kidney cancer, endometrial cancer, melanoma, bladder cancer, osteosarcoma, prostate cancer, myeloma, spleen cancer, bone marrow cell cancer, or colorectal cancer.

198. The method of claim 196, wherein the cancer is TKI-resistant, cetuximab-resistant, necitumumab-resistant, panitumumab-resistant, an advanced cancer, a metastatic cancer, a metastatic cancer in the central nervous system, metastatic breast cancer, metastatic skin cancer, a refractory cancer, a KRAS wild type cancer, a KRAS mutant cancer, or an exon20 mutant non-small-cell lung cancer.

199. The method of claim 196, wherein the neurodegenerative disease is Alzheimer's disease, amyotrophic lateral sclerosis, Friedreich's ataxia, Huntington's disease, schizophrenia, Parkinson's disease, or spinal muscular atrophy.

200. The method of claim 196, wherein the inflammatory disease is rheumatoid arthritis, psoriasis, multiple sclerosis, glomerulonephritis, lupus, inflammatory bowel disease, ulcerative colitis, Crohn's disease, cutaneous vasculitis, neuroinflammatory disease, inflammation-associated neurodegeneration, Alzheimer's disease, stroke, traumatic brain injury, Sjogren's disease, or cystic fibrosis.

201. A peptide complex comprising:
a transferrin receptor-binding peptide; and
a target-binding peptide complexed with the transferrin receptor-binding peptide, wherein the target-binding peptide has a binding affinity for a target.

202. The peptide complex of claim 201, wherein the binding affinity of the target-binding peptide for the target is pH-independent.

203. The peptide complex of claim 201, wherein the binding affinity of the target-binding peptide for the target is substantially the same the binding affinity at pH 7.4 and pH 5.5.

204. The peptide complex of claim 201, wherein the target is an extracellular protein, a secreted peptide, a secreted protein, a circulating protein, a soluble protein, a cell surface protein, or a transmembrane protein.

205. The peptide complex of claim 201, wherein the target is a growth factor receptor, a receptor tyrosine kinase, a cell signaling molecule, an extracellular matrix macromolecule, a neurotransmitter, a cytokine, a growth factor, a tumor associated antigen, a tumor specific antigen, a hormone, a checkpoint inhibitor, an immune checkpoint inhibitor, an inhibitory immune receptor, a ligand of an inhibitory immune receptor, a macrophage surface protein, a lipopolysaccharide, an antibody, an inhibitory immune receptor, a tumor associated antigen, a tumor specific antigen, or an autoantibody.

206. The peptide complex of claim 201, wherein the target is collagen, elastin, a microfibrillar protein, a proteoglycan, CD200R, CD300a, CD300f, CEACAM1, FcgRiib, ILT-2, ILT-3, ILT-4, ILT-5, LAIR-1, PECAM-1, PILR-alpha, SIRL-1, and SIRP-alpha, CLEC4A, Ly49Q, MIC, CD3, CD47, CD28, CD137, CD89, CD14, CD16, CD29, CD44, CD71, CD73, CD90, CD105, CD166, CD27, CD39, CD24, CD25, CD74, CD40L, MUC1, MUC16, MUC2, MUC5AC, MUC4, OX40, 4-1BB, HLA-G, LAG3, Tim3, TIGIT, GITR, TCR, TNF-α, EGFR, EGFRvIII, TKI-resistant EGFR, HER2, ERBB3, PDGFR, FGF, VEGF, VEGFR, IGFR1, CTLA4, STRO1, complement factor C4, complement factor C1q, complement factor C1s, complement factor C1r, complement factor C3, complement factor C3a, complement factor C3b, complement factor C5, complement factor C5a, TGFβ, PCSK9, P2Y6, HER3, RANK, tau, amyloid ß, huntingtin, α-synuclein, glucocerebrosidase, α-glucosidase, apolipoprotein E4, IL-1, IL-1R, IL-1α, IL-1β, IL-2, IL-2R, IL-4, IL-5, IL-6, IL-6R, IL-10, IL-10R, IL-17, IL-23, IL-12, p40, a member of the B7 family, c-Met, SIGLEC, MCP-1, an MHC, an MHC I, an MHC II, PD-1, or PD-L1.

207. The peptide complex of claim 201, wherein the target is EGFR, EGFRvIII, PD-L1, IL-1R, IL-1β, c-Met, FGFR-1, ERBB3, HER2, AXL receptor, CD44, IGF1R, MUC1, PDGFR, CD47, CD73, CD30, VEGFR, VEGFR2, complement factor C4, tau, amyloid ß, α-synuclein, PCSK9, or TNFα.

208. The peptide complex of claim 201, wherein the transferrin receptor-binding peptide, the target-binding peptide, or both comprises a miniprotein, a nanobody, an antibody, an antibody fragment, an scFv, a DARPin, or an affibody.

209. The peptide complex of claim 201, wherein the transferrin receptor-binding peptide comprises a cystine-dense peptide comprising at least three disulfide bonds.

210. The peptide complex of claim 201, wherein the transferrin receptor-binding peptide comprises a sequence of SEQ ID NO: 170.

211. The peptide complex of claim 201, wherein the transferrin receptor-binding peptide comprises a sequence having at least 90% sequence identity to any one of SEQ ID NO: 96, SEQ ID NO: 65-SEQ ID NO: 95, SEQ ID NO: 97-SEQ ID NO: 128, SEQ ID NO: 220-SEQ ID NO: 222, or SEQ ID NO: 1-SEQ ID NO: 64, or wherein the transferrin receptor-binding peptide comprises a sequence having at least 90% sequence identity to a fragment of any one of SEQ ID NO: 96, SEQ ID NO: 65-SEQ ID NO: 95, SEQ ID NO: 97-SEQ ID NO: 128, SEQ ID NO: 220-SEQ ID NO: 222, or SEQ ID NO: 1-SEQ ID NO: 64.

212. The peptide complex of claim 201, wherein the transferrin receptor-binding peptide comprises a sequence of SEQ ID NO: 96, SEQ ID NO: 66, SEQ ID NO: 220, SEQ ID NO: 221, or SEQ ID NO: 222.

213. The peptide complex of claim 201, wherein the target-binding peptide comprises a sequence that has at least 90% sequence identity with SEQ ID NO: 219 or SEQ ID NO: 242.

214. The peptide complex of claim 201, wherein the target-binding peptide comprises a sequence that has at least 90% sequence identity with SEQ ID NO: 242.

215. The peptide complex of claim 201, wherein the target-binding peptide comprises a sequence that has at least 90% sequence identity with SEQ ID NO: 219.

216. The peptide complex of claim 201, wherein the target-binding peptide comprises one or more histidine residues at a target-binding interface.

217. The peptide complex of claim 201, wherein the peptide complex comprises a dimer dimerized via a dimerization domain, wherein the dimerization domain comprises an Fc domain, a homodimerization domain, a first heterodimerization domain, a second heterodimerization domain, or combinations thereof.

218. The peptide complex of claim 217, wherein the first heterodimerization domain comprises a sequence that has at least 90% sequence identity with any one of SEQ ID NO: 260, SEQ ID NO: 262, SEQ ID NO: 264, SEQ ID NO: 266, SEQ ID NO: 268, SEQ ID NO: 270, SEQ ID NO: 272, SEQ ID NO: 274, SEQ ID NO: 276, SEQ ID NO: 278, SEQ ID NO: 280, SEQ ID NO: 282, SEQ ID NO: 284, or SEQ ID NO: 286.

219. The peptide complex of claim 201, comprising a sequence that has at least 90% sequence identity with any one of SEQ ID NO: 292, SEQ ID NO: 295, SEQ ID NO: 298, SEQ ID NO: 299, SEQ ID NO: 301, SEQ ID NO: 311, SEQ ID NO: 315, SEQ ID NO: 316, SEQ ID NO: 347, SEQ ID NO: 349, SEQ ID NO: 350, SEQ ID NO: 353, SEQ ID NO: 368, SEQ ID NO: 369, SEQ ID NO: 371-SEQ ID NO: 380, SEQ ID NO: 382-SEQ ID NO: 389.

220. A method of depleting a target molecule from a cellular surface or an extracellular space, the method comprising:
contacting a peptide complex to a cell expressing a transferrin receptor, wherein the peptide complex comprises:
a transferrin receptor-binding peptide, and
a target-binding peptide complexed with the transferrin receptor-binding peptide;
binding the target-binding peptide to the target molecule under extracellular conditions;
binding the transferrin receptor-binding peptide to the transferrin receptor under extracellular conditions; and
endocytosing the peptide complex, the target molecule, and the transferrin receptor; and
thereby depleting the target molecule from the cellular surface or the extracellular space.

221. The method of claim 220, wherein the target molecule is an extracellular protein, a secreted peptide, a secreted protein, a circulating protein, a soluble protein, a cell surface protein, or a transmembrane protein.

The application's sequence listing, which the Patent Office published only in electronic form, follows.

SEQUENCE LISTING (457 sequences)

SEQ ID NO: 1 - protein, 51 aa, Artificial Sequence
  Description of Artificial Sequence: Synthetic polypeptide
GSREGCASRCTKYNAELEKCEARVSSMSNTEETCVQELFDLLHCVDHCVSQ

SEQ ID NO: 2 - protein, 51 aa, Artificial Sequence
  Description of Artificial Sequence: Synthetic polypeptide
GSREGCASRCTKYNAELEKCEARVMSMSNTEEDCEQELEDLLHCLDHCHSQ

SEQ ID NO: 3 - protein, 51 aa, Artificial Sequence
  Description of Artificial Sequence: Synthetic polypeptide
GSREGCASRCTKYNAELEKCEARVVSMSNTEEDCEQELEDLLHCLDHCHSQ

SEQ ID NO: 4 - protein, 51 aa, Artificial Sequence
  Description of Artificial Sequence: Synthetic polypeptide
GSREGCASRCTKYNAELEKCEARVMSMSNTEETCEQELEDLLHCLDHCHSQ

SEQ ID NO: 5 - protein, 51 aa, Artificial Sequence
  Description of Artificial Sequence: Synthetic polypeptide
GSREGCASRCTKYNAELEKCEARVMSMSNTEEDCVQELEDLLHCLDHCHSQ

SEQ ID NO: 6 - protein, 51 aa, Artificial Sequence
  Description of Artificial Sequence: Synthetic polypeptide
GSREGCASRCTKYNAELEKCEARVMSMSNTEEDCEQELFDLLHCLDHCHSQ

SEQ ID NO: 7 - protein, 51 aa, Artificial Sequence
  Description of Artificial Sequence: Synthetic polypeptide
GSREGCASRCTKYNAELEKCEARVMSMSNTEEDCEQELEDLLHCVDHCHSQ

SEQ ID NO: 8 - protein, 51 aa, Artificial Sequence
  Description of Artificial Sequence: Synthetic polypeptide
GSREGCASRCTKYNAELEKCEARVMSMSNTEEDCEQELEDLLHCLDHCVSQ

SEQ ID NO: 9 - protein, 51 aa, Artificial Sequence
  Description of Artificial Sequence: Synthetic polypeptide
GSREGCASRCTKYNAELEKCEARVVSMSNTEETCEQELEDLLHCLDHCHSQ

SEQ ID NO: 10 - protein, 51 aa, Artificial Sequence
  Description of Artificial Sequence: Synthetic polypeptide
GSREGCASRCTKYNAELEKCEARVVSMSNTEEDCVQELEDLLHCLDHCHSQ

SEQ ID NO: 11 - protein, 51 aa, Artificial Sequence
  Description of Artificial Sequence: Synthetic polypeptide
GSREGCASRCTKYNAELEKCEARVVSMSNTEEDCEQELFDLLHCLDHCHSQ

SEQ ID NO: 12 - protein, 51 aa, Artificial Sequence
  Description of Artificial Sequence: Synthetic polypeptide
GSREGCASRCTKYNAELEKCEARVVSMSNTEEDCEQELEDLLHCVDHCHSQ

SEQ ID NO: 13 - protein, 51 aa, Artificial Sequence
  Description of Artificial Sequence: Synthetic polypeptide
GSREGCASRCTKYNAELEKCEARVVSMSNTEEDCEQELEDLLHCLDHCVSQ

SEQ ID NO: 14 - protein, 51 aa, Artificial Sequence
  Description of Artificial Sequence: Synthetic polypeptide
GSREGCASRCTKYNAELEKCEARVMSMSNTEETCVQELEDLLHCLDHCHSQ

SEQ ID NO: 15 - protein, 51 aa, Artificial Sequence
  Description of Artificial Sequence: Synthetic polypeptide
GSREGCASRCTKYNAELEKCEARVMSMSNTEETCEQELFDLLHCLDHCHSQ

SEQ ID NO: 16 - protein, 51 aa, Artificial Sequence
  Description of Artificial Sequence: Synthetic polypeptide
GSREGCASRCTKYNAELEKCEARVMSMSNTEETCEQELEDLLHCVDHCHSQ

SEQ ID NO: 17 - protein, 51 aa, Artificial Sequence
  Description of Artificial Sequence: Synthetic polypeptide
GSREGCASRCTKYNAELEKCEARVMSMSNTEETCEQELEDLLHCLDHCVSQ

SEQ ID NO: 18 - protein, 51 aa, Artificial Sequence
  Description of Artificial Sequence: Synthetic polypeptide
GSREGCASRCTKYNAELEKCEARVMSMSNTEEDCVQELFDLLHCLDHCHSQ

SEQ ID NO: 19 - protein, 51 aa, Artificial Sequence
  Description of Artificial Sequence: Synthetic polypeptide
GSREGCASRCTKYNAELEKCEARVMSMSNTEEDCVQELEDLLHCVDHCHSQ

SEQ ID NO: 20 - protein, 51 aa, Artificial Sequence
  Description of Artificial Sequence: Synthetic polypeptide
GSREGCASRCTKYNAELEKCEARVMSMSNTEEDCVQELEDLLHCLDHCVSQ

SEQ ID NO: 21 - protein, 51 aa, Artificial Sequence
  Description of Artificial Sequence: Synthetic polypeptide
GSREGCASRCTKYNAELEKCEARVMSMSNTEEDCEQELFDLLHCVDHCHSQ

SEQ ID NO: 22 - protein, 51 aa, Artificial Sequence
  Description of Artificial Sequence: Synthetic polypeptide
GSREGCASRCTKYNAELEKCEARVMSMSNTEEDCEQELFDLLHCLDHCVSQ

SEQ ID NO: 23 - protein, 51 aa, Artificial Sequence
  Description of Artificial Sequence: Synthetic polypeptide
GSREGCASRCTKYNAELEKCEARVMSMSNTEEDCEQELEDLLHCVDHCVSQ

SEQ ID NO: 24 - protein, 51 aa, Artificial Sequence
  Description of Artificial Sequence: Synthetic polypeptide
GSREGCASRCMKYNAELEKCEARVMSMSNTEEDCEQELEDLLHCLDHCHSQ

SEQ ID NO: 25 - protein, 51 aa, Artificial Sequence
  Description of Artificial Sequence: Synthetic polypeptide
GSREGCASRCTKYNDELEKCEARVMSMSNTEEDCEQELEDLLHCLDHCHSQ

SEQ ID NO: 26 - protein, 51 aa, Artificial Sequence
  Description of Artificial Sequence: Synthetic polypeptide
GSREGCASRCTKYNAELEKCEARMMSMSNTEEDCEQELEDLLHCLDHCHSQ

SEQ ID NO: 27 - protein, 51 aa, Artificial Sequence
  Description of Artificial Sequence: Synthetic polypeptide
GSREGCASRCTKYNAELEKCEARVMSMSNTEEDCEQELEDLLYCLDHCHSQ

SEQ ID NO: 28 - protein, 51 aa, Artificial Sequence
  Description of Artificial Sequence: Synthetic polypeptide
GSREGCASRCMKYNDELEKCEARMMSMSNTEEDCEQELEDLLHCLDHCHSQ

SEQ ID NO: 29 - protein, 51 aa, Artificial Sequence
  Description of Artificial Sequence: Synthetic polypeptide
GSREGCASRCMKYNDELEKCEARVMSMSNTEEDCEQELEDLLYCLDHCHSQ

SEQ ID NO: 30 - protein, 51 aa, Artificial Sequence
  Description of Artificial Sequence: Synthetic polypeptide
GSREGCASRCMKYNAELEKCEARMMSMSNTEEDCEQELEDLLYCLDHCHSQ

SEQ ID NO: 31 - protein, 51 aa, Artificial Sequence
  Description of Artificial Sequence: Synthetic polypeptide
GSREGCASRCTKYNDELEKCEARMMSMSNTEEDCEQELEDLLYCLDHCHSQ

SEQ ID NO: 32 - protein, 51 aa, Artificial Sequence
  Description of Artificial Sequence: Synthetic polypeptide
GSREGCASRCMKYNDELEKCEARMMSMSNTEEDCEQELEDLLYCLDHCHSQ

SEQ ID NO: 33 - protein, 51 aa, Artificial Sequence
  Description of Artificial Sequence: Synthetic polypeptide
GSREGCASRCTRYNAELERCEARVSSMSNTEETCVQELFDLLHCVDHCVSQ

SEQ ID NO: 34 - protein, 51 aa, Artificial Sequence
  Description of Artificial Sequence: Synthetic polypeptide
GSREGCASRCTRYNAELERCEARVMSMSNTEEDCEQELEDLLHCLDHCHSQ

SEQ ID NO: 35 - protein, 51 aa, Artificial Sequence
  Description of Artificial Sequence: Synthetic polypeptide
GSREGCASRCTRYNAELERCEARVVSMSNTEEDCEQELEDLLHCLDHCHSQ

SEQ ID NO: 36 - protein, 51 aa, Artificial Sequence
  Description of Artificial Sequence: Synthetic polypeptide
GSREGCASRCTRYNAELERCEARVMSMSNTEETCEQELEDLLHCLDHCHSQ

SEQ ID NO: 37 - protein, 51 aa, Artificial Sequence
  Description of Artificial Sequence: Synthetic polypeptide
GSREGCASRCTRYNAELERCEARVMSMSNTEEDCVQELEDLLHCLDHCHSQ

SEQ ID NO: 38 - protein, 51 aa, Artificial Sequence
  Description of Artificial Sequence: Synthetic polypeptide
GSREGCASRCTRYNAELERCEARVMSMSNTEEDCEQELFDLLHCLDHCHSQ

SEQ ID NO: 39 - protein, 51 aa, Artificial Sequence
  Description of Artificial Sequence: Synthetic polypeptide
GSREGCASRCTRYNAELERCEARVMSMSNTEEDCEQELEDLLHCVDHCHSQ

SEQ ID NO: 40 - protein, 51 aa, Artificial Sequence
  Description of Artificial Sequence: Synthetic polypeptide
GSREGCASRCTRYNAELERCEARVMSMSNTEEDCEQELEDLLHCLDHCVSQ

SEQ ID NO: 41 - protein, 51 aa, Artificial Sequence
  Description of Artificial Sequence: Synthetic polypeptide
GSREGCASRCTRYNAELERCEARVVSMSNTEETCEQELEDLLHCLDHCHSQ

SEQ ID NO: 42 - protein, 51 aa, Artificial Sequence
  Description of Artificial Sequence: Synthetic polypeptide
GSREGCASRCTRYNAELERCEARVVSMSNTEEDCVQELEDLLHCLDHCHSQ

SEQ ID NO: 43 - protein, 51 aa, Artificial Sequence
  Description of Artificial Sequence: Synthetic polypeptide
GSREGCASRCTRYNAELERCEARVVSMSNTEEDCEQELFDLLHCLDHCHSQ

SEQ ID NO: 44 - protein, 51 aa, Artificial Sequence
  Description of Artificial Sequence: Synthetic polypeptide
GSREGCASRCTRYNAELERCEARVVSMSNTEEDCEQELEDLLHCVDHCHSQ

SEQ ID NO: 45 - protein, 51 aa, Artificial Sequence
  Description of Artificial Sequence: Synthetic polypeptide
GSREGCASRCTRYNAELERCEARVVSMSNTEEDCEQELEDLLHCLDHCVSQ

SEQ ID NO: 46 - protein, 51 aa, Artificial Sequence
  Description of Artificial Sequence: Synthetic polypeptide
GSREGCASRCTRYNAELERCEARVMSMSNTEETCVQELEDLLHCLDHCHSQ

SEQ ID NO: 47 - protein, 51 aa, Artificial Sequence
  Description of Artificial Sequence: Synthetic polypeptide
GSREGCASRCTRYNAELERCEARVMSMSNTEETCEQELFDLLHCLDHCHSQ

SEQ ID NO: 48 - protein, 51 aa, Artificial Sequence
  Description of Artificial Sequence: Synthetic polypeptide
GSREGCASRCTRYNAELERCEARVMSMSNTEETCEQELEDLLHCVDHCHSQ

SEQ ID NO: 49 - protein, 51 aa, Artificial Sequence
  Description of Artificial Sequence: Synthetic polypeptide
GSREGCASRCTRYNAELERCEARVMSMSNTEETCEQELEDLLHCLDHCVSQ

SEQ ID NO: 50 - protein, 51 aa, Artificial Sequence
  Description of Artificial Sequence: Synthetic polypeptide
GSREGCASRCTRYNAELERCEARVMSMSNTEEDCVQELFDLLHCLDHCHSQ

SEQ ID NO: 51 - protein, 51 aa, Artificial Sequence
  Description of Artificial Sequence: Synthetic polypeptide
GSREGCASRCTRYNAELERCEARVMSMSNTEEDCVQELEDLLHCVDHCHSQ

SEQ ID NO: 52 - protein, 51 aa, Artificial Sequence
  Description of Artificial Sequence: Synthetic polypeptide
GSREGCASRCTRYNAELERCEARVMSMSNTEEDCVQELEDLLHCLDHCVSQ

SEQ ID NO: 53 - protein, 51 aa, Artificial Sequence
  Description of Artificial Sequence: Synthetic polypeptide
GSREGCASRCTRYNAELERCEARVMSMSNTEEDCEQELFDLLHCVDHCHSQ

SEQ ID NO: 54 - protein, 51 aa, Artificial Sequence
  Description of Artificial Sequence: Synthetic polypeptide
GSREGCASRCTRYNAELERCEARVMSMSNTEEDCEQELFDLLHCLDHCVSQ

SEQ ID NO: 55 - protein, 51 aa, Artificial Sequence
  Description of Artificial Sequence: Synthetic polypeptide
GSREGCASRCTRYNAELERCEARVMSMSNTEEDCEQELEDLLHCVDHCVSQ

SEQ ID NO: 56 - protein, 51 aa, Artificial Sequence
  Description of Artificial Sequence: Synthetic polypeptide
GSREGCASRCMRYNAELERCEARVMSMSNTEEDCEQELEDLLHCLDHCHSQ

SEQ ID NO: 57 - protein, 51 aa, Artificial Sequence
  Description of Artificial Sequence: Synthetic polypeptide
GSREGCASRCTRYNDELERCEARVMSMSNTEEDCEQELEDLLHCLDHCHSQ

SEQ ID NO: 58 - protein, 51 aa, Artificial Sequence
  Description of Artificial Sequence: Synthetic polypeptide
GSREGCASRCTRYNAELERCEARMMSMSNTEEDCEQELEDLLHCLDHCHSQ

SEQ ID NO: 59 - protein, 51 aa, Artificial Sequence
  Description of Artificial Sequence: Synthetic polypeptide
GSREGCASRCTRYNAELERCEARVMSMSNTEEDCEQELEDLLYCLDHCHSQ

SEQ ID NO: 60 - protein, 51 aa, Artificial Sequence
  Description of Artificial Sequence: Synthetic polypeptide
GSREGCASRCMRYNDELERCEARMMSMSNTEEDCEQELEDLLHCLDHCHSQ

SEQ ID NO: 61 - protein, 51 aa, Artificial Sequence
  Description of Artificial Sequence: Synthetic polypeptide
GSREGCASRCMRYNDELERCEARVMSMSNTEEDCEQELEDLLYCLDHCHSQ

SEQ ID NO: 62 - protein, 51 aa, Artificial Sequence
  Description of Artificial Sequence: Synthetic polypeptide
GSREGCASRCMRYNAELERCEARMMSMSNTEEDCEQELEDLLYCLDHCHSQ

SEQ ID NO: 63 - protein, 51 aa, Artificial Sequence
  Description of Artificial Sequence: Synthetic polypeptide
GSREGCASRCTRYNDELERCEARMMSMSNTEEDCEQELEDLLYCLDHCHSQ

SEQ ID NO: 64 - protein, 51 aa, Artificial Sequence
  Description of Artificial Sequence: Synthetic polypeptide
GSREGCASRCMRYNDELERCEARMMSMSNTEEDCEQELEDLLYCLDHCHSQ

SEQ ID NO: 65 - protein, 49 aa, Artificial Sequence
  Description of Artificial Sequence: Synthetic polypeptide
REGCASRCTKYNAELEKCEARVSSMSNTEETCVQELFDLLHCVDHCVSQ

SEQ ID NO: 66 - protein, 49 aa, Artificial Sequence
  Description of Artificial Sequence: Synthetic polypeptide
REGCASRCTKYNAELEKCEARVMSMSNTEEDCEQELEDLLHCLDHCHSQ

SEQ ID NO: 67 - protein, 49 aa, Artificial Sequence
  Description of Artificial Sequence: Synthetic polypeptide
REGCASRCTKYNAELEKCEARVVSMSNTEEDCEQELEDLLHCLDHCHSQ

SEQ ID NO: 68 - protein, 49 aa, Artificial Sequence
  Description of Artificial Sequence: Synthetic polypeptide
REGCASRCTKYNAELEKCEARVMSMSNTEETCEQELEDLLHCLDHCHSQ

SEQ ID NO: 69 - protein, 49 aa, Artificial Sequence
  Description of Artificial Sequence: Synthetic polypeptide
REGCASRCTKYNAELEKCEARVMSMSNTEEDCVQELEDLLHCLDHCHSQ

SEQ ID NO: 70 - protein, 49 aa, Artificial Sequence
  Description of Artificial Sequence: Synthetic polypeptide
REGCASRCTKYNAELEKCEARVMSMSNTEEDCEQELFDLLHCLDHCHSQ

SEQ ID NO: 71 - protein, 49 aa, Artificial Sequence
  Description of Artificial Sequence: Synthetic polypeptide
REGCASRCTKYNAELEKCEARVMSMSNTEEDCEQELEDLLHCVDHCHSQ

SEQ ID NO: 72 - protein, 49 aa, Artificial Sequence
  Description of Artificial Sequence: Synthetic polypeptide
REGCASRCTKYNAELEKCEARVMSMSNTEEDCEQELEDLLHCLDHCVSQ

SEQ ID NO: 73 - protein, 49 aa, Artificial Sequence
  Description of Artificial Sequence: Synthetic polypeptide
REGCASRCTKYNAELEKCEARVVSMSNTEETCEQELEDLLHCLDHCHSQ

SEQ ID NO: 74 - protein, 49 aa, Artificial Sequence
  Description of Artificial Sequence: Synthetic polypeptide
REGCASRCTKYNAELEKCEARVVSMSNTEEDCVQELEDLLHCLDHCHSQ

SEQ ID NO: 75 - protein, 49 aa, Artificial Sequence
  Description of Artificial Sequence: Synthetic polypeptide
REGCASRCTKYNAELEKCEARVVSMSNTEEDCEQELFDLLHCLDHCHSQ

SEQ ID NO: 76 - protein, 49 aa, Artificial Sequence
  Description of Artificial Sequence: Synthetic polypeptide
REGCASRCTKYNAELEKCEARVVSMSNTEEDCEQELEDLLHCVDHCHSQ

SEQ ID NO: 77 - protein, 49 aa, Artificial Sequence
  Description of Artificial Sequence: Synthetic polypeptide
REGCASRCTKYNAELEKCEARVVSMSNTEEDCEQELEDLLHCLDHCVSQ

SEQ ID NO: 78 - protein, 49 aa, Artificial Sequence
  Description of Artificial Sequence: Synthetic polypeptide
REGCASRCTKYNAELEKCEARVMSMSNTEETCVQELEDLLHCLDHCHSQ

SEQ ID NO: 79 - protein, 49 aa, Artificial Sequence
  Description of Artificial Sequence: Synthetic polypeptide
REGCASRCTKYNAELEKCEARVMSMSNTEETCEQELFDLLHCLDHCHSQ

SEQ ID NO: 80 - protein, 49 aa, Artificial Sequence
  Description of Artificial Sequence: Synthetic polypeptide
REGCASRCTKYNAELEKCEARVMSMSNTEETCEQELEDLLHCVDHCHSQ

SEQ ID NO: 81 - protein, 49 aa, Artificial Sequence
  Description of Artificial Sequence: Synthetic polypeptide
REGCASRCTKYNAELEKCEARVMSMSNTEETCEQELEDLLHCLDHCVSQ

SEQ ID NO: 82 - protein, 49 aa, Artificial Sequence
  Description of Artificial Sequence: Synthetic polypeptide
REGCASRCTKYNAELEKCEARVMSMSNTEEDCVQELFDLLHCLDHCHSQ

SEQ ID NO: 83 - protein, 49 aa, Artificial Sequence
  Description of Artificial Sequence: Synthetic polypeptide
REGCASRCTKYNAELEKCEARVMSMSNTEEDCVQELEDLLHCVDHCHSQ

SEQ ID NO: 84 - protein, 49 aa, Artificial Sequence
  Description of Artificial Sequence: Synthetic polypeptide
REGCASRCTKYNAELEKCEARVMSMSNTEEDCVQELEDLLHCLDHCVSQ

SEQ ID NO: 85 - protein, 49 aa, Artificial Sequence
  Description of Artificial Sequence: Synthetic polypeptide
REGCASRCTKYNAELEKCEARVMSMSNTEEDCEQELFDLLHCVDHCHSQ

SEQ ID NO: 86 - protein, 49 aa, Artificial Sequence
  Description of Artificial Sequence: Synthetic polypeptide
REGCASRCTKYNAELEKCEARVMSMSNTEEDCEQELFDLLHCLDHCVSQ

SEQ ID NO: 87 - protein, 49 aa, Artificial Sequence
  Description of Artificial Sequence: Synthetic polypeptide
REGCASRCTKYNAELEKCEARVMSMSNTEEDCEQELEDLLHCVDHCVSQ

SEQ ID NO: 88 - protein, 49 aa, Artificial Sequence
  Description of Artificial Sequence: Synthetic polypeptide
REGCASRCMKYNAELEKCEARVMSMSNTEEDCEQELEDLLHCLDHCHSQ

SEQ ID NO: 89 - protein, 49 aa, Artificial Sequence
  Description of Artificial Sequence: Synthetic polypeptide
REGCASRCTKYNDELEKCEARVMSMSNTEEDCEQELEDLLHCLDHCHSQ

SEQ ID NO: 90 - protein, 49 aa, Artificial Sequence
  Description of Artificial Sequence: Synthetic polypeptide
REGCASRCTKYNAELEKCEARMMSMSNTEEDCEQELEDLLHCLDHCHSQ

SEQ ID NO: 91 - protein, 49 aa, Artificial Sequence
  Description of Artificial Sequence: Synthetic polypeptide
REGCASRCTKYNAELEKCEARVMSMSNTEEDCEQELEDLLYCLDHCHSQ

SEQ ID NO: 92 - protein, 49 aa, Artificial Sequence
  Description of Artificial Sequence: Synthetic polypeptide
REGCASRCMKYNDELEKCEARMMSMSNTEEDCEQELEDLLHCLDHCHSQ

SEQ ID NO: 93 - protein, 49 aa, Artificial Sequence
  Description of Artificial Sequence: Synthetic polypeptide
REGCASRCMKYNDELEKCEARVMSMSNTEEDCEQELEDLLYCLDHCHSQ

SEQ ID NO: 94 - protein, 49 aa, Artificial Sequence
  Description of Artificial Sequence: Synthetic polypeptide
REGCASRCMKYNAELEKCEARMMSMSNTEEDCEQELEDLLYCLDHCHSQ

SEQ ID NO: 95 - protein, 49 aa, Artificial Sequence
  Description of Artificial Sequence: Synthetic polypeptide
REGCASRCTKYNDELEKCEARMMSMSNTEEDCEQELEDLLYCLDHCHSQ

SEQ ID NO: 96 - protein, 49 aa, Artificial Sequence
  Description of Artificial Sequence: Synthetic polypeptide
REGCASRCMKYNDELEKCEARMMSMSNTEEDCEQELEDLLYCLDHCHSQ

SEQ ID NO: 97 - protein, 49 aa, Artificial Sequence
  Description of Artificial Sequence: Synthetic polypeptide
REGCASRCTRYNAELERCEARVSSMSNTEETCVQELFDLLHCVDHCVSQ

SEQ ID NO: 98 - protein, 49 aa, Artificial Sequence
  Description of Artificial Sequence: Synthetic polypeptide
REGCASRCTRYNAELERCEARVMSMSNTEEDCEQELEDLLHCLDHCHSQ

SEQ ID NO: 99 - protein, 49 aa, Artificial Sequence
  Description of Artificial Sequence: Synthetic polypeptide
REGCASRCTRYNAELERCEARVVSMSNTEEDCEQELEDLLHCLDHCHSQ

SEQ ID NO: 100 - protein, 49 aa, Artificial Sequence
  Description of Artificial Sequence: Synthetic polypeptide
REGCASRCTRYNAELERCEARVMSMSNTEETCEQELEDLLHCLDHCHSQ

SEQ ID NO: 101 - protein, 49 aa, Artificial Sequence
  Description of Artificial Sequence: Synthetic polypeptide
REGCASRCTRYNAELERCEARVMSMSNTEEDCVQELEDLLHCLDHCHSQ

SEQ ID NO: 102 - protein, 49 aa, Artificial Sequence
  Description of Artificial Sequence: Synthetic polypeptide
REGCASRCTRYNAELERCEARVMSMSNTEEDCEQELFDLLHCLDHCHSQ

SEQ ID NO: 103 - protein, 49 aa, Artificial Sequence
  Description of Artificial Sequence: Synthetic polypeptide
REGCASRCTRYNAELERCEARVMSMSNTEEDCEQELEDLLHCVDHCHSQ

SEQ ID NO: 104 - protein, 49 aa, Artificial Sequence
  Description of Artificial Sequence: Synthetic polypeptide
REGCASRCTRYNAELERCEARVMSMSNTEEDCEQELEDLLHCLDHCVSQ

SEQ ID NO: 105 - protein, 49 aa, Artificial Sequence
  Description of Artificial Sequence: Synthetic polypeptide
REGCASRCTRYNAELERCEARVVSMSNTEETCEQELEDLLHCLDHCHSQ

SEQ ID NO: 106 - protein, 49 aa, Artificial Sequence
  Description of Artificial Sequence: Synthetic polypeptide
REGCASRCTRYNAELERCEARVVSMSNTEEDCVQELEDLLHCLDHCHSQ

SEQ ID NO: 107 - protein, 49 aa, Artificial Sequence
  Description of Artificial Sequence: Synthetic polypeptide
REGCASRCTRYNAELERCEARVVSMSNTEEDCEQELFDLLHCLDHCHSQ

SEQ ID NO: 108 - protein, 49 aa, Artificial Sequence
  Description of Artificial Sequence: Synthetic polypeptide
REGCASRCTRYNAELERCEARVVSMSNTEEDCEQELEDLLHCVDHCHSQ

SEQ ID NO: 109 - protein, 49 aa, Artificial Sequence
  Description of Artificial Sequence: Synthetic polypeptide
REGCASRCTRYNAELERCEARVVSMSNTEEDCEQELEDLLHCLDHCVSQ

SEQ ID NO: 110 - protein, 49 aa, Artificial Sequence
  Description of Artificial Sequence: Synthetic polypeptide
REGCASRCTRYNAELERCEARVMSMSNTEETCVQELEDLLHCLDHCHSQ

SEQ ID NO: 111 - protein, 49 aa, Artificial Sequence
  Description of Artificial Sequence: Synthetic polypeptide
REGCASRCTRYNAELERCEARVMSMSNTEETCEQELFDLLHCLDHCHSQ

SEQ ID NO: 112 - protein, 49 aa, Artificial Sequence
  Description of Artificial Sequence: Synthetic polypeptide
REGCASRCTRYNAELERCEARVMSMSNTEETCEQELEDLLHCVDHCHSQ

SEQ ID NO: 113 - protein, 49 aa, Artificial Sequence
  Description of Artificial Sequence: Synthetic polypeptide
REGCASRCTRYNAELERCEARVMSMSNTEETCEQELEDLLHCLDHCVSQ

SEQ ID NO: 114 - protein, 49 aa, Artificial Sequence
  Description of Artificial Sequence: Synthetic polypeptide
REGCASRCTRYNAELERCEARVMSMSNTEEDCVQELFDLLHCLDHCHSQ

SEQ ID NO: 115 - protein, 49 aa, Artificial Sequence
  Description of Artificial Sequence: Synthetic polypeptide
REGCASRCTRYNAELERCEARVMSMSNTEEDCVQELEDLLHCVDHCHSQ

SEQ ID NO: 116 - protein, 49 aa, Artificial Sequence
  Description of Artificial Sequence: Synthetic polypeptide
REGCASRCTRYNAELERCEARVMSMSNTEEDCVQELEDLLHCLDHCVSQ

SEQ ID NO: 117 - protein, 49 aa, Artificial Sequence
  Description of Artificial Sequence: Synthetic polypeptide
REGCASRCTRYNAELERCEARVMSMSNTEEDCEQELFDLLHCVDHCHSQ

SEQ ID NO: 118 - protein, 49 aa, Artificial Sequence
  Description of Artificial Sequence: Synthetic polypeptide
REGCASRCTRYNAELERCEARVMSMSNTEEDCEQELFDLLHCLDHCVSQ

SEQ ID NO: 119 - protein, 49 aa, Artificial Sequence
  Description of Artificial Sequence: Synthetic polypeptide
REGCASRCTRYNAELERCEARVMSMSNTEEDCEQELEDLLHCVDHCVSQ

SEQ ID NO: 120 - protein, 49 aa, Artificial Sequence
  Description of Artificial Sequence: Synthetic polypeptide
REGCASRCMRYNAELERCEARVMSMSNTEEDCEQELEDLLHCLDHCHSQ

SEQ ID NO: 121 - protein, 49 aa, Artificial Sequence
  Description of Artificial Sequence: Synthetic polypeptide
REGCASRCTRYNDELERCEARVMSMSNTEEDCEQELEDLLHCLDHCHSQ

SEQ ID NO: 122 - protein, 49 aa, Artificial Sequence
  Description of Artificial Sequence: Synthetic polypeptide
REGCASRCTRYNAELERCEARMMSMSNTEEDCEQELEDLLHCLDHCHSQ

SEQ ID NO: 123 - protein, 49 aa, Artificial Sequence
  Description of Artificial Sequence: Synthetic polypeptide
REGCASRCTRYNAELERCEARVMSMSNTEEDCEQELEDLLYCLDHCHSQ

SEQ ID NO: 124 - protein, 49 aa, Artificial Sequence
  Description of Artificial Sequence: Synthetic polypeptide
REGCASRCMRYNDELERCEARMMSMSNTEEDCEQELEDLLHCLDHCHSQ

SEQ ID NO: 125 - protein, 49 aa, Artificial Sequence
  Description of Artificial Sequence: Synthetic polypeptide
REGCASRCMRYNDELERCEARVMSMSNTEEDCEQELEDLLYCLDHCHSQ

SEQ ID NO: 126 - protein, 49 aa, Artificial Sequence
  Description of Artificial Sequence: Synthetic polypeptide
REGCASRCMRYNAELERCEARMMSMSNTEEDCEQELEDLLYCLDHCHSQ

SEQ ID NO: 127 - protein, 49 aa, Artificial Sequence
  Description of Artificial Sequence: Synthetic polypeptide
REGCASRCTRYNDELERCEARMMSMSNTEEDCEQELEDLLYCLDHCHSQ

SEQ ID NO: 128 - protein, 49 aa, Artificial Sequence
  Description of Artificial Sequence: Synthetic polypeptide
REGCASRCMRYNDELERCEARMMSMSNTEEDCEQELEDLLYCLDHCHSQ

SEQ ID NO: 129 - protein, 4 aa, Artificial Sequence
  Description of Artificial Sequence: Synthetic peptide
GGGS

SEQ ID NO: 130 - protein, 20 aa, Artificial Sequence
  Description of Artificial Sequence: Synthetic peptide
  SITE (1)..(10): This region may encompass 1-10 residues
  SITE (11)..(20): This region may encompass 1-10 residues
GGGGGGGGGGSSSSSSSSSS

SEQ ID NO: 131 - protein, 20 aa, Artificial Sequence
  Description of Artificial Sequence: Synthetic peptide
  SITE (1)..(20): This sequence may encompass 1-10 "Gly Ser" repeating units
GSGSGSGSGSGSGSGSGSGS

SEQ ID NO: 132 - protein, 5 aa, Artificial Sequence
  Description of Artificial Sequence: Synthetic peptide
GGSSG

SEQ ID NO: 133 - protein, 5 aa, Artificial Sequence
  Description of Artificial Sequence: Synthetic peptide
GGGGG

SEQ ID NO: 134 - protein, 8 aa, Artificial Sequence
  Description of Artificial Sequence: Synthetic peptide
GSGSGSGS

SEQ ID NO: 135 - protein, 4 aa, Artificial Sequence
  Description of Artificial Sequence: Synthetic peptide
GSGG

SEQ ID NO: 136 - protein, 5 aa, Artificial Sequence
  Description of Artificial Sequence: Synthetic peptide
GGGGS

SEQ ID NO: 137 - protein, 3 aa, Artificial Sequence
  Description of Artificial Sequence: Synthetic peptide
GGS

SEQ ID NO: 138 - protein, 12 aa, Artificial Sequence
  Description of Artificial Sequence: Synthetic peptide
GGGSGGGSGGGS

SEQ ID NO: 139 - protein, 12 aa, Artificial Sequence
  Description of Artificial Sequence: Synthetic peptide
KKYKPYVPVTTN

SEQ ID NO: 140 - protein, 10 aa, Artificial Sequence
  Description of Artificial Sequence: Synthetic peptide
EPKSSDKTHT

SEQ ID NO: 141 - protein, 11 aa, Artificial Sequence
  Description of Artificial Sequence: Synthetic peptide
GGGSGGSGGGS

SEQ ID NO: 142 - protein, 6 aa, Artificial Sequence
  Description of Artificial Sequence: Synthetic 6xHis tag
HHHHHH

SEQ ID NO: 143 - protein, 8 aa, Artificial Sequence
  Description of Artificial Sequence: Synthetic peptide
DYKDDDDK

SEQ ID NO: 144 - protein, 5 aa, Artificial Sequence
  Description of Artificial Sequence: Synthetic peptide
DYKDE

SEQ ID NO: 145 - protein, 9 aa, Artificial Sequence
  Description of Artificial Sequence: Synthetic peptide
YPYDVPDYA

SEQ ID NO: 146 - protein, 9 aa, Artificial Sequence
  Description of Artificial Sequence: Synthetic peptide
DVEAWLGAR

SEQ ID NO: 147 - protein, 221 aa, Artificial Sequence
  Description of Artificial Sequence: Synthetic polypeptide
METDTLLLWVLLLWVPGSTGDYKDEHHHHHHGGSQDSTSDLIPAPPLSKVPLQQNFQDNQFQGKWYVVGLAGNAILREDKDPQKMYATIYELKEDKSYNVTSVLFRKKKCDYWIRTFVPGSQPGEFTLGNIKSYPGLTSYLVRVVSTNYNQHAMVFFKKVSQNREYFKITLYGRTKELTSELKENFIRFSKSLGLPENHIVFPVPIDQCIDGGGSENLYFQ

SEQ ID NO: 148 - protein, 51 aa, Artificial Sequence
  Description of Artificial Sequence: Synthetic polypeptide
  MOD_RES (8)..(8): S, T, D, or N
  MOD_RES (11)..(11): A, M, I, L, or V
  MOD_RES (14)..(14): D, E, H, K, R, N, Q, S, or T
  MOD_RES (17)..(17): A, M, I, L, or V
  MOD_RES (18)..(18): D, E, N, Q, S, or T
  MOD_RES (21)..(21): D, E, N, Q, S, or T
  MOD_RES (38)..(38): A, M, I, L, or V
  MOD_RES (41)..(41): A, M, I, L, or V
  MOD_RES (42)..(42): A, M, I, L, or V
  MOD_RES (45)..(45): A, M, I, L, or V
  MOD_RES (46)..(46): D, E, N, Q, S, or T
  MOD_RES (47)..(47): H, K, R, N, Q, S, or T
  MOD_RES (49)..(49): H, K, R, N, Q, S, or T
  MOD_RES (50)..(50): S, T, D, or N
  MOD_RES (51)..(51): D, E, H, K, R, N, Q, S, or T
GSREGCAXRCXKYXDEXXKCXARMMSMSNTEEDCEQEXEDXXYCXXXCXXX

SEQ ID NO: 149 - protein, 51 aa, Artificial Sequence
  Description of Artificial Sequence: Synthetic polypeptide
  MOD_RES (5)..(5): Any amino acid
  MOD_RES (7)..(7): Any amino acid
  MOD_RES (8)..(8): Any amino acid
  MOD_RES (11)..(11): Any amino acid
  MOD_RES (14)..(14): Any amino acid
  MOD_RES (17)..(17): Any amino acid
  MOD_RES (18)..(18): Any amino acid
  MOD_RES (21)..(21): Any amino acid
GSREXCXXRCXKYXDEXXKCXARMMSMSNTEEDCEQELEDLLYCLDHCHSQ

SEQ ID NO: 150 - protein, 51 aa, Artificial Sequence
  Description of Artificial Sequence: Synthetic polypeptide
  MOD_RES (38)..(38): Any amino acid
  MOD_RES (41)..(41): Any amino acid
  MOD_RES (42)..(42): Any amino acid
  MOD_RES (45)..(45): Any amino acid
  MOD_RES (46)..(46): Any amino acid
  MOD_RES (47)..(47): Any amino acid
  MOD_RES (49)..(49): Any amino acid
  MOD_RES (50)..(50): Any amino acid
  MOD_RES (51)..(51): Any amino acid
GSREGCASRCMKYNDELEKCEARMMSMSNTEEDCEQEXEDXXYCXXXCXXX

SEQ ID NO: 151 - protein, 51 aa, Artificial Sequence
  Description of Artificial Sequence: Synthetic polypeptide
  MOD_RES (5)..(5): Any amino acid
  MOD_RES (7)..(7): Any amino acid
  MOD_RES (8)..(8): Any amino acid
  MOD_RES (11)..(11): Any amino acid
  MOD_RES (14)..(14): Any amino acid
  MOD_RES (17)..(17): Any amino acid
  MOD_RES (18)..(18): Any amino acid
  MOD_RES (21)..(21): Any amino acid
  MOD_RES (38)..(38): Any amino acid
  MOD_RES (41)..(41): Any amino acid
  MOD_RES (42)..(42): Any amino acid
  MOD_RES (45)..(45): Any amino acid
  MOD_RES (46)..(46): Any amino acid
  MOD_RES (47)..(47): Any amino acid
  MOD_RES (49)..(49): Any amino acid
  MOD_RES (50)..(50): Any amino acid
  MOD_RES (51)..(51): Any amino acid
GSREXCXXRCXKYXDEXXKCXARMMSMSNTEEDCEQEXEDXXYCXXXCXXX

SEQ ID NO: 152 - protein, 51 aa, Artificial Sequence
  Description of Artificial Sequence: Synthetic polypeptide
  MOD_RES (1)..(1): Any amino acid
  MOD_RES (2)..(2): Any amino acid
  MOD_RES (3)..(3): Any amino acid
  MOD_RES (4)..(4): Any amino acid
  MOD_RES (6)..(6): Any amino acid
  MOD_RES (9)..(9): Any amino acid
  MOD_RES (10)..(10): Any amino acid
  MOD_RES (12)..(12): Any amino acid
  MOD_RES (13)..(13): Any amino acid
  MOD_RES (15)..(15): Any amino acid
  MOD_RES (16)..(16): Any amino acid
  MOD_RES (19)..(19): Any amino acid
  MOD_RES (20)..(20): Any amino acid
  MOD_RES (22)..(22): Any amino acid
  MOD_RES (23)..(23): Any amino acid
  MOD_RES (24)..(24): Any amino acid
  MOD_RES (25)..(25): Any amino acid
  MOD_RES (26)..(26): Any amino acid
  MOD_RES (27)..(27): Any amino acid
  MOD_RES (28)..(28): Any amino acid
  MOD_RES (29)..(29): Any amino acid
  MOD_RES (30)..(30): Any amino acid
  MOD_RES (31)..(31): Any amino acid
  MOD_RES (32)..(32): Any amino acid
  MOD_RES (33)..(33): Any amino acid
  MOD_RES (34)..(34): Any amino acid
  MOD_RES (35)..(35): Any amino acid
  MOD_RES (36)..(36): Any amino acid
  MOD_RES (37)..(37): Any amino acid
  MOD_RES (38)..(38): Any amino acid
  MOD_RES (39)..(39): Any amino acid
  MOD_RES (40)..(40): Any amino acid
  MOD_RES (41)..(41): Any amino acid
  MOD_RES (42)..(42): Any amino acid
  MOD_RES (43)..(43): Any amino acid
  MOD_RES (44)..(44): Any amino acid
  MOD_RES (45)..(45): Any amino acid
  MOD_RES (46)..(46): Any amino acid
  MOD_RES (47)..(47): Any amino acid
  MOD_RES (48)..(48): Any amino acid
  MOD_RES (49)..(49): Any amino acid
  MOD_RES (50)..(50): Any amino acid
  MOD_RES (51)..(51): Any amino acid
XXXXGXASXXMXXNXXLEXXEXXXXXXXXXXXXXXXXXXXXXXXXXXXXXX

SEQ ID NO: 153 - protein, 51 aa, Artificial Sequence
  Description of Artificial Sequence: Synthetic polypeptide
  MOD_RES (1)..(1): Any amino acid
  MOD_RES (2)..(2): Any amino acid
  MOD_RES (3)..(3): Any amino acid
  MOD_RES (4)..(4): Any amino acid
  MOD_RES (5)..(5): Any amino acid
  MOD_RES (6)..(6): Any amino acid
  MOD_RES (7)..(7): Any amino acid
  MOD_RES (8)..(8): Any amino acid
  MOD_RES (9)..(9): Any amino acid
  MOD_RES (10)..(10): Any amino acid
  MOD_RES (11)..(11): Any amino acid
  MOD_RES (12)..(12): Any amino acid
  MOD_RES (13)..(13): Any amino acid
  MOD_RES (14)..(14): Any amino acid
  MOD_RES (15)..(15): Any amino acid
  MOD_RES (16)..(16): Any amino acid
  MOD_RES (17)..(17): Any amino acid
  MOD_RES (18)..(18): Any amino acid
  MOD_RES (19)..(19): Any amino acid
  MOD_RES (20)..(20): Any amino acid
  MOD_RES (21)..(21): Any amino acid
  MOD_RES (22)..(22): Any amino acid
  MOD_RES (23)..(23): Any amino acid
  MOD_RES (24)..(24): Any amino acid
  MOD_RES (25)..(25): Any amino acid
  MOD_RES (26)..(26): Any amino acid
  MOD_RES (27)..(27): Any amino acid
  MOD_RES (28)..(28): Any amino acid
  MOD_RES (29)..(29): Any amino acid
  MOD_RES (30)..(30): Any amino acid
  MOD_RES (31)..(31): Any amino acid
  MOD_RES (32)..(32): Any amino acid
  MOD_RES (33)..(33): Any amino acid
  MOD_RES (34)..(34): Any amino acid
  MOD_RES (35)..(35): Any amino acid
  MOD_RES (36)..(36): Any amino acid
  MOD_RES (37)..(37): Any amino acid
  MOD_RES (39)..(39): Any amino acid
  MOD_RES (40)..(40): Any amino acid
  MOD_RES (43)..(43): Any amino acid
  MOD_RES (44)..(44): Any amino acid
  MOD_RES (48)..(48): Any amino acid
XXXXXXXXXXXXXXXXXXXXXXXXXXXXXXXXXXXXXLXXLLXXLDHXHSQ

SEQ ID NO: 154 - protein, 51 aa, Artificial Sequence
  Description of Artificial Sequence: Synthetic polypeptide
  MOD_RES (1)..(1): Any amino acid
  MOD_RES (2)..(2): Any amino acid
  MOD_RES (3)..(3): Any amino acid
  MOD_RES (4)..(4): Any amino acid
  MOD_RES (6)..(6): Any amino acid
  MOD_RES (9)..(9): Any amino acid
  MOD_RES (10)..(10): Any amino acid
  MOD_RES (12)..(12): Any amino acid
  MOD_RES (13)..(13): Any amino acid
  MOD_RES (15)..(15): Any amino acid
  MOD_RES (16)..(16): Any amino acid
  MOD_RES (19)..(19): Any amino acid
  MOD_RES (20)..(20): Any amino acid
  MOD_RES (22)..(22): Any amino acid
  MOD_RES (23)..(23): Any amino acid
  MOD_RES (24)..(24): Any amino acid
  MOD_RES (25)..(25): Any amino acid
  MOD_RES (26)..(26): Any amino acid
  MOD_RES (27)..(27): Any amino acid
  MOD_RES (28)..(28): Any amino acid
  MOD_RES (29)..(29): Any amino acid
  MOD_RES (30)..(30): Any amino acid
  MOD_RES (31)..(31): Any amino acid
  MOD_RES (32)..(32): Any amino acid
  MOD_RES (33)..(33): Any amino acid
  MOD_RES (34)..(34): Any amino acid
  MOD_RES (35)..(35): Any amino acid
  MOD_RES (36)..(36): Any amino acid
  MOD_RES (37)..(37): Any amino acid
  MOD_RES (39)..(39): Any amino acid
  MOD_RES (40)..(40): Any amino acid
  MOD_RES (43)..(43): Any amino acid
  MOD_RES (44)..(44): Any amino acid
  MOD_RES (48)..(48): Any amino acid
XXXXGXASXXMXXNXXLEXXEXXXXXXXXXXXXXXXXLXXLLXXLDHXHSQ

SEQ ID NO: 155 - protein, 51 aa, Artificial Sequence
  Description of Artificial Sequence: Synthetic polypeptide
  MOD_RES (1)..(1): Any amino acid
  MOD_RES (2)..(2): Any amino acid
  MOD_RES (3)..(3): Any amino acid
  MOD_RES (4)..(4): Any amino acid
  MOD_RES (6)..(6): Any amino acid
  MOD_RES (9)..(9): Any amino acid
  MOD_RES (10)..(10): Any amino acid
  MOD_RES (11)..(11): Any amino acid
  MOD_RES (12)..(12): Any amino acid
  MOD_RES (13)..(13): Any amino acid
  MOD_RES (15)..(15): Any amino acid
  MOD_RES (16)..(16): Any amino acid
  MOD_RES (19)..(19): Any amino acid
  MOD_RES (20)..(20): Any amino acid
  MOD_RES (22)..(22): Any amino acid
  MOD_RES (23)..(23): Any amino acid
  MOD_RES (24)..(24): Any amino acid
  MOD_RES (25)..(25): Any amino acid
  MOD_RES (26)..(26): Any amino acid
  MOD_RES (27)..(27): Any amino acid
  MOD_RES (28)..(28): Any amino acid
  MOD_RES (29)..(29): Any amino acid
  MOD_RES (30)..(30): Any amino acid
  MOD_RES (31)..(31): Any amino acid
  MOD_RES (32)..(32): Any amino acid
  MOD_RES (33)..(33): Any amino acid
  MOD_RES (34)..(34): Any amino acid
  MOD_RES (35)..(35): Any amino acid
  MOD_RES (36)..(36): Any amino acid
  MOD_RES (37)..(37): Any amino acid
  MOD_RES (39)..(39): Any amino acid
  MOD_RES (40)..(40): Any amino acid
  MOD_RES (41)..(41): Any amino acid
  MOD_RES (43)..(43): Any amino acid
  MOD_RES (44)..(44): Any amino acid
  MOD_RES (48)..(48): Any amino acid
  MOD_RES (49)..(49): Any amino acid
XXXXGXASXXXXXNXXLEXXEXXXXXXXXXXXXXXXXLXXXLXXLDHXXSQ

SEQ ID NO: 156 - protein, 51 aa, Artificial Sequence
  Description of Artificial Sequence: Synthetic polypeptide
  MOD_RES (1)..(1): Any amino acid
  MOD_RES (2)..(2): Any amino acid
  MOD_RES (5)..(5): Any amino acid
  MOD_RES (6)..(6): Any amino acid
  MOD_RES (7)..(7): Any amino acid
  MOD_RES (8)..(8): Any amino acid
  MOD_RES (10)..(10): Any amino acid
  MOD_RES (11)..(11): Any amino acid
  MOD_RES (13)..(13): Any amino acid
  MOD_RES (14)..(14): Any amino acid
  MOD_RES (17)..(17): Any amino acid
  MOD_RES (18)..(18): Any amino acid
  MOD_RES (20)..(20): Any amino acid
  MOD_RES (21)..(21): Any amino acid
  MOD_RES (22)..(22): Any amino acid
  MOD_RES (24)..(24): Any amino acid
  MOD_RES (25)..(25): Any amino acid
  MOD_RES (27)..(27): Any amino acid
  MOD_RES (34)..(34): Any amino acid
  MOD_RES (38)..(38): Any amino acid
  MOD_RES (41)..(41): Any amino acid
  MOD_RES (42)..(42): Any amino acid
  MOD_RES (43)..(43): Any amino acid
  MOD_RES (44)..(44): Any amino acid
  MOD_RES (45)..(45): Any amino acid
  MOD_RES (46)..(46): Any amino acid
  MOD_RES (47)..(47): Any amino acid
  MOD_RES (48)..(48): Any amino acid
  MOD_RES (49)..(49): Any amino acid
  MOD_RES (50)..(50): Any amino acid
  MOD_RES (51)..(51): Any amino acid
XXREXXXXRXXKXXDEXXKXXXRXXSXSNTEEDXEQEXEDXXXXXXXXXXX

SEQ ID NO: 157 - protein, 51 aa, Artificial Sequence
  Description of Artificial Sequence: Synthetic polypeptide
  MOD_RES (3)..(3): D, E, H, K, R, N, Q, S, or T
  MOD_RES (4)..(4): D, E, H, K, R, N, Q, S, or T
  MOD_RES (9)..(9): D, E, H, K, R, N, Q, S, or T
  MOD_RES (12)..(12): D, E, H, K, R, N, Q, S, or T
  MOD_RES (15)..(15): D, E, H, K, R, N, Q, S, or T
  MOD_RES (16)..(16): D, E, H, K, R, N, Q, S, or T
  MOD_RES (19)..(19): D, E, H, K, R, N, Q, S, or T
  MOD_RES (23)..(23): D, E, H, K, R, N, Q, S, or T
  MOD_RES (26)..(26): D, E, H, K, R, N, Q, S, or T
  MOD_RES (28)..(28): D, E, H, K, R, N, Q, S, or T
  MOD_RES (29)..(29): D, E, H, K, R, N, Q, S, or T
  MOD_RES (30)..(30): D, E, H, K, R, N, Q, S, or T
  MOD_RES (31)..(31): D, E, H, K, R, N, Q, S, or T
  MOD_RES (32)..(32): D, E, H, K, R, N, Q, S, or T
  MOD_RES (33)..(33): D, E, H, K, R, N, Q, S, or T
  MOD_RES (35)..(35): D, E, H, K, R, N, Q, S, or T
  MOD_RES (36)..(36): D, E, H, K, R, N, Q, S, or T
  MOD_RES (37)..(37): D, E, H, K, R, N, Q, S, or T
  MOD_RES (39)..(39): D, E, H, K, R, N, Q, S, or T
  MOD_RES (40)..(40): D, E, H, K, R, N, Q, S, or T
GSXXGCASXCMXYNXXLEXCEAXMMXMXXXXXXCXXXLXXLLYCLDHCHSQ

SEQ ID NO: 158 - protein, 51 aa, Artificial Sequence
  Description of Artificial Sequence: Synthetic polypeptide
  MOD_RES (1)..(1): Any amino acid
  MOD_RES (2)..(2): Any amino acid
  MOD_RES (3)..(3): Any amino acid
  MOD_RES (4)..(4): Any amino acid
  MOD_RES (5)..(5): Any amino acid
  MOD_RES (6)..(6): Any amino acid
  MOD_RES (7)..(7): Any amino acid
  MOD_RES (8)..(8): Any amino acid
  MOD_RES (9)..(9): Any amino acid
  MOD_RES (10)..(10): Any amino acid
  MOD_RES (11)..(11): Any amino acid
  MOD_RES (12)..(12): Any amino acid
  MOD_RES (13)..(13): Any amino acid
  MOD_RES (14)..(14): Any amino acid
  MOD_RES (16)..(16): Any amino acid
  MOD_RES (17)..(17): Any amino acid
  MOD_RES (18)..(18): Any amino acid
  MOD_RES (19)..(19): Any amino acid
  MOD_RES (20)..(20): Any amino acid
  MOD_RES (21)..(21): Any amino acid
  MOD_RES (22)..(22): Any amino acid
  MOD_RES (23)..(23): Any amino acid
  MOD_RES (24)..(24): Any amino acid
  MOD_RES (25)..(25): Any amino acid
  MOD_RES (26)..(26): Any amino acid
  MOD_RES (27)..(27): Any amino acid
  MOD_RES (28)..(28): Any amino acid
  MOD_RES (29)..(29): Any amino acid
  MOD_RES (30)..(30): Any amino acid
  MOD_RES (31)..(31): Any amino acid
  MOD_RES (32)..(32): Any amino acid
  MOD_RES (33)..(33): Any amino acid
  MOD_RES (34)..(34): Any amino acid
  MOD_RES (36)..(36): Any amino acid
  MOD_RES (37)..(37): Any amino acid
  MOD_RES (38)..(38): Any amino acid
  MOD_RES (40)..(40): Any amino acid
  MOD_RES (41)..(41): Any amino acid
  MOD_RES (42)..(42): Any amino acid
  MOD_RES (43)..(43): Any amino acid
  MOD_RES (44)..(44): Any amino acid
  MOD_RES (45)..(45): Any amino acid
  MOD_RES (46)..(46): Any amino acid
  MOD_RES (47)..(47): Any amino acid
  MOD_RES (48)..(48): Any amino acid
  MOD_RES (50)..(50): Any amino acid
  MOD_RES (51)..(51): Any amino acid
XXXXXXXXXXXXXXDXXXXXXXXXXXXXXXXXXXEXXXEXXXXXXXXXHXX

SEQ ID NO: 159 - protein, 51 aa, Artificial Sequence
  Description of Artificial Sequence: Synthetic polypeptide
  MOD_RES (15)..(15): D, E, H, K, R, N, Q, S, or T
  MOD_RES (35)..(35): D, E, H, K, R, N, Q, S, or T
  MOD_RES (39)..(39): D, E, H, K, R, N, Q, S, or T
  MOD_RES (49)..(49): D, E, H, K, R, N, Q, S, or T
GSREGCASRCMKYNXELEKCEARMMSMSNTEEDCXQELXDLLYCLDHCXSQ

SEQ ID NO: 160 - protein, 51 aa, Artificial Sequence; identical to SEQ ID NO: 159
  Description of Artificial Sequence: Synthetic polypeptide
  MOD_RES (15)..(15): A, M, I, L, V, F, W, or Y
  MOD_RES (35)..(35): A, M, I, L, V, F, W, or Y
  MOD_RES (39)..(39): A, M, I, L, V, F, W, or Y
  MOD_RES (49)..(49): A, M, I, L, V, F, W, or Y

SEQ ID NO: 161 - protein, 51 aa, Artificial Sequence
  Description of Artificial Sequence: Synthetic polypeptide
  MOD_RES (1)..(1): Any amino acid
  MOD_RES (2)..(2): Any amino acid
  MOD_RES (3)..(3): Any amino acid
  MOD_RES (4)..(4): Any amino acid
  MOD_RES (5)..(5): Any amino acid
  MOD_RES (6)..(6): Any amino acid
  MOD_RES (7)..(7): Any amino acid
  MOD_RES (8)..(8): Any amino acid
  MOD_RES (9)..(9): Any amino acid
  MOD_RES (10)..(10): Any amino acid
  MOD_RES (12)..(12): Any amino acid
  MOD_RES (13)..(13): Any amino acid
  MOD_RES (14)..(14): Any amino acid
  MOD_RES (15)..(15): Any amino acid
  MOD_RES (16)..(16): Any amino acid
  MOD_RES (17)..(17): Any amino acid
  MOD_RES (18)..(18): Any amino acid
  MOD_RES (19)..(19): Any amino acid
  MOD_RES (20)..(20): Any amino acid
  MOD_RES (21)..(21): Any amino acid
  MOD_RES (22)..(22): Any amino acid
  MOD_RES (23)..(23): Any amino acid
  MOD_RES (24)..(24): Any amino acid
  MOD_RES (26)..(26): Any amino acid
  MOD_RES (28)..(28): Any amino acid
  MOD_RES (29)..(29): Any amino acid
  MOD_RES (30)..(30): Any amino acid
  MOD_RES (31)..(31): Any amino acid
  MOD_RES (32)..(32): Any amino acid
  MOD_RES (33)..(33): Any amino acid
  MOD_RES (34)..(34): Any amino acid
  MOD_RES (35)..(35): Any amino acid
  MOD_RES (36)..(36): Any amino acid
  MOD_RES (37)..(37): Any amino acid
  MOD_RES (38)..(38): Any amino acid
  MOD_RES (39)..(39): Any amino acid
  MOD_RES (40)..(40): Any amino acid
  MOD_RES (41)..(41): Any amino acid
  MOD_RES (42)..(42): Any amino acid
  MOD_RES (43)..(43): Any amino acid
  MOD_RES (44)..(44): Any amino acid
  MOD_RES (45)..(45): Any amino acid
  MOD_RES (46)..(46): Any amino acid
  MOD_RES (47)..(47): Any amino acid
  MOD_RES (48)..(48): Any amino acid
  MOD_RES (49)..(49): Any amino acid
  MOD_RES (50)..(50): Any amino acid
  MOD_RES (51)..(51): Any amino acid
XXXXXXXXXXMXXXXXXXXXXXXXMXMXXXXXXXXXXXXXXXXXXXXXXXX

SEQ ID NO: 162 - protein, 51 aa, Artificial Sequence
  Description of Artificial Sequence: Synthetic polypeptide
  MOD_RES (11)..(11): A, M, I, L, V, F, W, or Y
  MOD_RES (25)..(25): A, M, I, L, V, F, W, or Y
  MOD_RES (27)..(27): A, M, I, L, V, F, W, or Y
GSREGCASRCXKYNDELEKCEARMXSXSNTEEDCEQELEDLLYCLDHCHSQ

SEQ ID NO: 163 - protein, 51 aa, Artificial Sequence; identical to SEQ ID NO: 162
  Description of Artificial Sequence: Synthetic polypeptide
  MOD_RES (11)..(11): D, E, H, K, R, N, Q, S, or T
  MOD_RES (25)..(25): D, E, H, K, R, N, Q, S, or T
  MOD_RES (27)..(27): D, E, H, K, R, N, Q, S, or T

SEQ ID NO: 164 - protein, 51 aa, Artificial Sequence
  Description of Artificial Sequence: Synthetic polypeptide
  MOD_RES (1)..(1): Any amino acid
  MOD_RES (2)..(2): Any amino acid
  MOD_RES (3)..(3): Any amino acid
  MOD_RES (4)..(4): Any amino acid
  MOD_RES (5)..(5): Any amino acid
  MOD_RES (6)..(6): Any amino acid
  MOD_RES (7)..(7): Any amino acid
  MOD_RES (8)..(8): Any amino acid
  MOD_RES (9)..(9): Any amino acid
  MOD_RES (10)..(10): Any amino acid
  MOD_RES (11)..(11): Any amino acid
  MOD_RES (12)..(12): Any amino acid
  MOD_RES (13)..(13): Any amino acid
  MOD_RES (14)..(14): Any amino acid
  MOD_RES (15)..(15): Any amino acid
  MOD_RES (16)..(16): Any amino acid
  MOD_RES (17)..(17): Any amino acid
  MOD_RES (18)..(18): Any amino acid
  MOD_RES (19)..(19): Any amino acid
  MOD_RES (20)..(20): Any amino acid
  MOD_RES (21)..(21): Any amino acid
  MOD_RES (22)..(22): Any amino acid
  MOD_RES (23)..(23): Any amino acid
  MOD_RES (24)..(24): Any amino acid
  MOD_RES (25)..(25): Any amino acid
  MOD_RES (26)..(26): Any amino acid
  MOD_RES (27)..(27): Any amino acid
  MOD_RES (28)..(28): Any amino acid
  MOD_RES (29)..(29): Any amino acid
  MOD_RES (30)..(30): Any amino acid
  MOD_RES (31)..(31): Any amino acid
  MOD_RES (32)..(32): Any amino acid
  MOD_RES (33)..(33): Any amino acid
  MOD_RES (34)..(34): Any amino acid
  MOD_RES (35)..(35): Any amino acid
  MOD_RES (36)..(36): Any amino acid
  MOD_RES (37)..(37): Any amino acid
  MOD_RES (38)..(38): Any amino acid
  MOD_RES (39)..(39): Any amino acid
  MOD_RES (40)..(40): Any amino acid
  MOD_RES (41)..(41): Any amino acid
  MOD_RES (42)..(42): Any amino acid
  MOD_RES (43)..(43): Any amino acid
  MOD_RES (44)..(44): Any amino acid
  MOD_RES (46)..(46): Any amino acid
  MOD_RES (47)..(47): Any amino acid
  MOD_RES (48)..(48): Any amino acid
  MOD_RES (49)..(49): Any amino acid
  MOD_RES (50)..(50): Any amino acid
  MOD_RES (51)..(51): Any amino acid
XXXXXXXXXXXXXXXXXXXXXXXXXXXXXXXXXXXXXXXXXXXXLXXXXXX

SEQ ID NO: 165 - protein, 51 aa, Artificial Sequence
  Description of Artificial Sequence: Synthetic polypeptide
  MOD_RES (45)..(45): A, M, I, L, or V
GSREGCASRCMKYNDELEKCEARMMSMSNTEEDCEQELEDLLYCXDHCHSQ

SEQ ID NO: 166 - protein, 51 aa, Artificial Sequence
  Description of Artificial Sequence: Synthetic polypeptide
  MOD_RES (12)..(12): K or R
  MOD_RES (19)..(19): K or R
GSREGCASRCMXYNDELEXCEARMMSMSNTEEDCEQELEDLLYCLDHCHSQ

SEQ ID NO: 167 - protein, 49 aa, Artificial Sequence
  Description of Artificial Sequence: Synthetic polypeptide
  MOD_RES (6)..(6): S, T, D, or N
  MOD_RES (9)..(9): A, M, I, L, or V
  MOD_RES (12)..(12): D, E, H, K, R, N, Q, S, or T
  MOD_RES (15)..(15): A, M, I, L, or V
  MOD_RES (16)..(16): D, E, N, Q, S, or T
  MOD_RES (19)..(19): D, E, N, Q, S, or T
  MOD_RES (36)..(36): A, M, I, L, or V
  MOD_RES (39)..(39): A, M, I, L, or V
  MOD_RES (40)..(40): A, M, I, L, or V
  MOD_RES (43)..(43): A, M, I, L, or V
  MOD_RES (44)..(44): D, E, N, Q, S, or T
  MOD_RES (45)..(45): H, K, R, N, Q, S, or T
  MOD_RES (47)..(47): H, K, R, N, Q, S, or T
  MOD_RES (48)..(48): S, T, D, or N
  MOD_RES (49)..(49): D, E, H, K, R, N, Q, S, or T
REGCAXRCXKYXDEXXKCXARMMSMSNTEEDCEQEXEDXXYCXXXCXXX

SEQ ID NO: 168 - protein, 49 aa, Artificial Sequence
  Description of Artificial Sequence: Synthetic polypeptide
  MOD_RES (3)..(3): Any amino acid
  MOD_RES (5)..(5): Any amino acid
  MOD_RES (6)..(6): Any amino acid
  MOD_RES (9)..(9): Any amino acid
  MOD_RES (12)..(12): Any amino acid
  MOD_RES (15)..(15): Any amino acid
  MOD_RES (16)..(16): Any amino acid
  MOD_RES (19)..(19): Any amino acid
REXCXXRCXKYXDEXXKCXARMMSMSNTEEDCEQELEDLLYCLDHCHSQ

SEQ ID NO: 169 - protein, 49 aa, Artificial Sequence
  Description of Artificial Sequence: Synthetic polypeptide
  MOD_RES (36)..(36): Any amino acid
  MOD_RES (39)..(39): Any amino acid
  MOD_RES (40)..(40): Any amino acid
  MOD_RES (43)..(43): Any amino acid
  MOD_RES (44)..(44): Any amino acid
  MOD_RES (45)..(45): Any amino acid
  MOD_RES (47)..(47): Any amino acid
  MOD_RES (48)..(48): Any amino acid
  MOD_RES (49)..(49): Any amino acid
REGCASRCMKYNDELEKCEARMMSMSNTEEDCEQEXEDXXYCXXXCXXX

SEQ ID NO: 170 - protein, 49 aa, Artificial Sequence
  Description of Artificial Sequence: Synthetic polypeptide
  MOD_RES (3)..(3): Any amino acid
  MOD_RES (5)..(5): Any amino acid
  MOD_RES (6)..(6): Any amino acid
  MOD_RES (9)..(9): Any amino acid
  MOD_RES (12)..(12): Any amino acid
  MOD_RES (15)..(15): Any amino acid
  MOD_RES (16)..(16): Any amino acid
  MOD_RES (19)..(19): Any amino acid
  MOD_RES (36)..(36): Any amino acid
  MOD_RES (39)..(39): Any amino acid
  MOD_RES (40)..(40): Any amino acid
  MOD_RES (43)..(43): Any amino acid
  MOD_RES (44)..(44): Any amino acid
  MOD_RES (45)..(45): Any amino acid
  MOD_RES (47)..(47): Any amino acid
  MOD_RES (48)..(48): Any amino acid
  MOD_RES (49)..(49): Any amino acid
REXCXXRCXKYXDEXXKCXARMMSMSNTEEDCEQEXEDXXYCXXXCXXX

SEQ ID NO: 171 - protein, 49 aa, Artificial Sequence
  Description of Artificial Sequence: Synthetic polypeptide
  MOD_RES (1)..(1): D, E, H, K, R, N, Q, S, or T
  MOD_RES (2)..(2): D, E, H, K, R, N, Q, S, or T
  MOD_RES (7)..(7): D, E, H, K, R, N, Q, S, or T
  MOD_RES (10)..(10): D, E, H, K, R, N, Q, S, or T
  MOD_RES (13)..(13): D, E, H, K, R, N, Q, S, or T
  MOD_RES (14)..(14): D, E, H, K, R, N, Q, S, or T
  MOD_RES (17)..(17): D, E, H, K, R, N, Q, S, or T
  MOD_RES (21)..(21): D, E, H, K, R, N, Q, S, or T
  MOD_RES (24)..(24): D, E, H, K, R, N, Q, S, or T
  MOD_RES (26)..(26): D, E, H, K, R, N, Q, S, or T
  MOD_RES (27)..(27): D, E, H, K, R, N, Q, S, or T
  MOD_RES (28)..(28): D, E, H, K, R, N, Q, S, or T
  MOD_RES (29)..(29): D, E, H, K, R, N, Q, S, or T
  MOD_RES (30)..(30): D, E, H, K, R, N, Q, S, or T
  MOD_RES (31)..(31): D, E, H, K, R, N, Q, S, or T
  MOD_RES (33)..(33): D, E, H, K, R, N, Q, S, or T
  MOD_RES (34)..(34): D, E, H, K, R, N, Q, S, or T
  MOD_RES (35)..(35): D, E, H, K, R, N, Q, S, or T
  MOD_RES (37)..(37): D, E, H, K, R, N, Q, S, or T
  MOD_RES (38)..(38): D, E, H, K, R, N, Q, S, or T
XXGCASXCMXYNXXLEXCEAXMMXMXXXXXXCXXXLXXLLYCLDHCHSQ

SEQ ID NO: 172 - protein, 49 aa, Artificial Sequence
  Description of Artificial Sequence: Synthetic polypeptide
  MOD_RES (13)..(13): D, E, H, K, R, N, Q, S, or T
  MOD_RES (33)..(33): D, E, H, K, R, N, Q, S, or T
  MOD_RES (37)..(37): D, E, H, K, R, N, Q, S, or T
  MOD_RES (47)..(47): D, E, H, K, R, N, Q, S, or T
REGCASRCMKYNXELEKCEARMMSMSNTEEDCXQELXDLLYCLDHCXSQ

SEQ ID NO: 173 - protein, 49 aa, Artificial Sequence; identical to SEQ ID NO: 172
  Description of Artificial Sequence: Synthetic polypeptide
  MOD_RES (13)..(13): A, M, I, L, V, F, W, or Y
  MOD_RES (33)..(33): A, M, I, L, V, F, W, or Y
  MOD_RES (37)..(37): A, M, I, L, V, F, W, or Y
  MOD_RES (47)..(47): A, M, I, L, V, F, W, or Y

SEQ ID NO: 174 - protein, 49 aa, Artificial Sequence
  Description of Artificial Sequence: Synthetic polypeptide
  MOD_RES (9)..(9): A, M, I, L, V, F, W, or Y
  MOD_RES (23)..(23): A, M, I, L, V, F, W, or Y
  MOD_RES (25)..(25): A, M, I, L, V, F, W, or Y
REGCASRCXKYNDELEKCEARMXSXSNTEEDCEQELEDLLYCLDHCHSQ

SEQ ID NO: 175 - protein, 49 aa, Artificial Sequence; identical to SEQ ID NO: 174
  Description of Artificial Sequence: Synthetic polypeptide
  MOD_RES (9)..(9): D, E, H, K, R, N, Q, S, or T
  MOD_RES (23)..(23): D, E, H, K, R, N, Q, S, or T
  MOD_RES (25)..(25): D, E, H, K, R, N, Q, S, or T

SEQ ID NO: 176 - protein, 49 aa, Artificial Sequence
  Description of Artificial Sequence: Synthetic polypeptide
  MOD_RES (43)..(43): A, M, I, L, or V
REGCASRCMKYNDELEKCEARMMSMSNTEEDCEQELEDLLYCXDHCHSQ

SEQ ID NO: 177 - protein, 49 aa, Artificial Sequence
  Description of Artificial Sequence: Synthetic polypeptide
  MOD_RES (10)..(10): K or R
  MOD_RES (17)..(17): K or R
REGCASRCMXYNDELEXCEARMMSMSNTEEDCEQELEDLLYCLDHCHSQ

SEQ ID NO: 178 - protein, 18 aa, Artificial Sequence
  Description of Artificial Sequence: Synthetic peptide
RLIEDICLPRWGCLWEDD

SEQ ID NO: 179 - protein, 38 aa, Artificial Sequence
  Description of Artificial Sequence: Synthetic polypeptide
GGGGSGGGGSRLIEDICLPRWGCLWEDDGGGGSGGGGS

SEQ ID NO: 180 - protein, 58 aa, Artificial Sequence
  Description of Artificial Sequence: Synthetic polypeptide
GSRLIEDICLPRWGCLWEDDGGGGSGGGGSKCLPPGKPCYGATQKIPCCGVCSHNNCT

SEQ ID NO: 181 - protein, 79 aa, Artificial Sequence
  Description of Artificial Sequence: Synthetic polypeptide
GSRLIEDICLPRWGCLWEDDGGGGSGGGGSREGCASRCMKYNDELEKCEARMMSMSNTEEDCEQELEDLLYCLDHCHSQ

SEQ ID NO: 182 - protein, 67 aa, Artificial Sequence
  Description of Artificial Sequence: Synthetic polypeptide
GSRLIEDICLPRWGCLWEDDGGGGSGGGGSVRIPVSCKHSGQCLKPCKDAGMRFGKCMNGKCDCTPK

SEQ ID NO: 183 - protein, 56 aa, Artificial Sequence
  Description of Artificial Sequence: Synthetic polypeptide
RLIEDICLPRWGCLWEDDGGGGSGGGGSKCLPPGKPCYGATQKIPCCGVCSHNNCT

SEQ ID NO: 184 - protein, 77 aa, Artificial Sequence
  Description of Artificial Sequence: Synthetic polypeptide
RLIEDICLPRWGCLWEDDGGGGSGGGGSREGCASRCMKYNDELEKCEARMMSMSNTEEDCEQELEDLLYCLDHCHSQ

SEQ ID NO: 185 - protein, 65 aa, Artificial Sequence
  Description of Artificial Sequence: Synthetic polypeptide
RLIEDICLPRWGCLWEDDGGGGSGGGGSVRIPVSCKHSGQCLKPCKDAGMRFGKCMNGKCDCTPK

SEQ ID NO: 186 - protein, 741 aa, Artificial Sequence
  Description of Artificial Sequence: Synthetic polypeptide
MRLAVGALLVCAVLGLCLADYKDEHHHHHHGLNDIFEAQKIEWHEGGGSKTVRWCAVSEHEATKCQSFRDHMKSVIPSDGPSVACVKKASYLDCIRAIAANEADAVTLDAGLVYDAYLAPNNLKPVVAEFYGSKEDPQTFYYAVAVVKKDSGFQMNQLRGKKSCHTGLGRSAGWNIPIGLLYCDLPEPRKPLEKAVANFFSGSCAPCADGTDFPQLCQLCPGCGCSTLNQYFGYSGAFKCLKDGAGDVAFVKHSTIFENLANKADRDQYELLCLDNTRKPVDEYKDCHLAQVPSHTVVARSMGGKEDLIWELLNQAQEHFGKDKSKEFQLFSSPHGKDLLFKDSAHGFLKVPPRMDAKMYLGYEYVTAIRNLREGTCPEAPTDECKPVKWCALSHHERLKCDEWSVNSVGKIECVSAETTEDCIAKIMNGEADAMSLDGGFVYIAGKCGLVPVLAENYDKSDNCEDTPEAGYFAVAVVKKSASDLTWDNLKGKKSCHTAVGRTAGWNIPMGLLYNKINHCRFDEFFSEGCAPGSKKDSSLCKLCMGSGLNLCEPNNKEGYYGYTGAFRCLVEKGDVAFVKHQTVPQNTGGKNPDPWAKNLNEKDYELLCLDGTRKPVEEYANCHLARAPNHAVVTRKDKEACVHKILRQQQHLFGSDVTDCSGNFCLFRSETKDLLFRDDTVCLAKLHDRNTYEKYLGEEYVKAVGNLRKCSTSSLLEACTFRRPGSSELYENKPRRPYIL

SEQ ID NO: 187 - protein, 49 aa, Artificial Sequence
  Description of Artificial Sequence: Synthetic polypeptide
EEDCKVHCVKEWMAGKACAERQKSYTIGRAHCSGQKFDVFKCLDHCAAP

SEQ ID NO: 188 - protein, 725 aa, Artificial Sequence
  Description of Artificial Sequence: Synthetic polypeptide
MRLAVGALLVCAVLGLCLADYKDEHHHHHHGLNDIFEAQKIEWHEGGGSKTVRWCAVSEHEATKCQSFRDHMKSVIPSDGPSVACVKKASYLDCIRAIAANEADAVTLDAGLVYDAYLAPNNLKPVVAEFYGSKEDPQTFYYAVAVVKKDSGFQMNQLRGKKSCHTGLGRSAGWNIPIGLLYCDLPEPRKPLEKAVANFFSGSCAPCADGTDFPQLCQLCPGCGCSTLNQYFGYSGAFKCLKDGAGDVAFVKHSTIFENLANKADRDQYELLCLDNTRKPVDEYKDCHLAQVPSHTVVARSMGGKEDLIWELLNQAQEHFGKDKSKEFQLFSSPHGKDLLFKDSAHGFLKVPPRMDAKMYLGYEYVTAIRNLREGTCPEAPTDECKPVKWCALSHHERLKCDEWSVNSVGKIECVSAETTEDCIAKIMNGEADAMSLDGGFVYIAGKCGLVPVLAENYDKSDNCEDTPEAGYFAVAVVKKSASDLTWDNLKGKKSCHTAVGRTAGWNIPMGLLYNKINHCRFDEFFSEGCAPGSKKDSSLCKLCMGSGLNLCEPNNKEGYYGYTGAFRCLVEKGDVAFVKHQTVPQNTGGKNPDPWAKNLNEKDYELLCLDGTRKPVEEYANCHLARAPNHAVVTRKDKEACVHKILRQQQHLFGSDVTDCSGNFCLFRSETKDLLFRDDTVCLAKLHDRNTYEKYLGEEYVKAVGNLRKCSTSSLLEACTFRRP

SEQ ID NO: 189 - protein, 676 aa, Artificial Sequence
  Description of Artificial Sequence: Synthetic polypeptide
KTVRWCAVSEHEATKCQSFRDHMKSVIPSDGPSVACVKKASYLDCIRAIAANEADAVTLDAGLVYDAYLAPNNLKPVVAEFYGSKEDPQTFYYAVAVVKKDSGFQMNQLRGKKSCHTGLGRSAGWNIPIGLLYCDLPEPRKPLEKAVANFFSGSCAPCADGTDFPQLCQLCPGCGCSTLNQYFGYSGAFKCLKDGAGDVAFVKHSTIFENLANKADRDQYELLCLDNTRKPVDEYKDCHLAQVPSHTVVARSMGGKEDLIWELLNQAQEHFGKDKSKEFQLFSSPHGKDLLFKDSAHGFLKVPPRMDAKMYLGYEYVTAIRNLREGTCPEAPTDECKPVKWCALSHHERLKCDEWSVNSVGKIECVSAETTEDCIAKIMNGEADAMSLDGGFVYIAGKCGLVPVLAENYNKSDNCEDTPEAGYFAIAVVKKSASDLTWDNLKGKKSCHTAVGRTAGWNIPMGLLYNKINHCRFDEFFSEGCAPGSKKDSSLCKLCMGSGLNLCEPNNKEGYYGYTGAFRCLVEKGDVAFVKHQTVPQNTGGKNPDPWAKNLNEKDYELLCLDGTRKPVEEYANCHLARAPNHAVVTRKDKEACVHKILRQQQHLFGSNVTDCSGNFCLFRSETKDLLFRDDTVCLAKLHDRNTYEKYLGEEYVKAVGNLRKCSTSSLLEACTFRRP

SEQ ID NO: 190 - protein, 760 aa, Homo sapiens
MMDQARSAFSNLFGGEPLSYTRFSLARQVDGDNSHVEMKLAVDEEENADNNTKANVTKPKRCSGSICYGTIAVIVFFLIGFMIGYLGYCKGVEPKTECERLAGTESPVREEPGEDFPAARRLYWDDLKRKLSEKLDSTDFTGTIKLLNENSYVPREAGSQKDENLALYVENQFREFKLSKVWRDQHFVKIQVKDSAQNSVIIVDKNGRLVYLVENPGGYVAYSKAATVTGKLVHANFGTKKDFEDLYTPVNGSIVIVRAGKITFAEKVANAESLNAIGVLIYMDQTKFPIVNAELSFFGHAHLGTGDPYTPGFPSFNHTQFPPSRSSGLPNIPVQTISRAAAEKLFGNMEGDCPSDWKTDSTCRMVTSESKNVKLTVSNVLKEIKILNIFGVIKGFVEPDHYVVVGAQRDAWGPGAAKSGVGTALLLKLAQMFSDMVLKDGFQPSRSIIFASWSAGDFGSVGATEWLEGYLSSLHLKAFTYINLDKAVLGTSNFKVSASPLLYTLIEKTMQNVKHPVTGQFLYQDSNWASKVEKLTLDNAAFPFLAYSGIPAVSFCFCEDTDYPYLGTTMDTYKELIERIPELNKVARAAAEVAGQFVIKLTHDVELNLDYERYNSQLLSFVRDLNQYRADIKEMGLSLQWLYSARGDFFRATSRLTTDFGNAEKTDRFVMKKLNDRVMRVEYHFLSPYVSPKESPFRHVFWGSGSHTLPALLENLKLRKQNNGAFNETLFRNQLALATWTIQGAANALSGDVWDIDNEF

SEQ ID NO: 191 - protein, 51 aa, Artificial Sequence
  Description of Artificial Sequence: Synthetic polypeptide
GSREGCASHCTKYKAELEKCEARVSSRSNTEETCVQELFDFLHCVDHCVSQ

SEQ ID NO: 192 - protein, 387 aa, Artificial Sequence
  Description of Artificial Sequence: Synthetic polypeptide
MKLNKKLLMAALAGAIVVGGGVNTFAADEPGAIKVDKAPEAPSQELKLTKEEAEKALKKEKPIAKERLRRLGITSEFILNQIDKATSREGLESLVQTIKQSYLKDHPIKEEKTEETPKYNNLFDKHELGGLGKDKGPGRFDENGWENNEHGYETRENAEKAAVKALGDKEINKSYTISQGVDGRYYYVLSREEAETPKKPEEKKPEDKRPKMTIDQWLLKNAKEDAIAELKKAGITSDFYFNAINKAKTVEEVNALKNEILKAHAGKEVNPSTPEVTPSVPQNHYHENDYANIGAGEGTKEDGKKENSKEGIKRKTAREEKPGKEEKPAKEDKKENKKKENTDSPNKKKKEKAALPEAGRRKAEILTLAAASLSSVAGAFISLKKRK

SEQ ID NO: 193 - protein, 45 aa, Artificial Sequence
  Description of Artificial Sequence: Synthetic polypeptide
LKNAKEDAIAELKKAGITSDFYFNAINKAKTVEEVNALKNEILKA

SEQ ID NO: 194 - protein, 45 aa, Artificial Sequence
  Description of Artificial Sequence: Synthetic polypeptide
LKEAKEKAIEELKKAGITSDYYFDLINKAKTVEGVNALKDEILKA

SEQ ID NO: 195 - protein, 74 aa, Artificial Sequence
  Description of Artificial Sequence: Synthetic polypeptide
AGSGGSGGSGGSPVPSTPPTNSSSTPPTPSPSPVPSTPPTNSSSTPPTPSPSPVPSTPPTNSSSTPPTPSPSAS

SEQ ID NO: 196 - protein, 74 aa, Artificial Sequence
  Description of Artificial Sequence: Synthetic polypeptide
AGSGGSGGSGGSPVPSTPPTPSPSTPPTPSPSPVPSTPPTNSSSTPPTPSPSPVPSTPPTPSPSTPPTPSPSAS

SEQ ID NO: 197 - protein, 66 aa, Artificial Sequence
  Description of Artificial Sequence: Synthetic polypeptide
AGSGGSGGSGGSPVPSTPPTPSPSTPPTPSPSGGSGNSSGSGGSPVPSTPPTPSPSTPPTPSPSAS

SEQ ID NO: 198 - protein, 74 aa, Artificial Sequence
  Description of Artificial Sequence: Synthetic polypeptide
AGSGGSGGSGGSPVPSTPPTPSPSTPPTPSPSPVPSTPPTPSPSTPPTPSPSPVPSTPPTPSPSTPPTPSPSAS

SEQ ID NO: 199 - protein, 152 aa, Artificial Sequence
  Description of Artificial Sequence: Synthetic polypeptide
AGSGGSGGSGGSPVPSTPPTPSPSTPPTPSPSIQRTPKIQVYSRHPAENGKSNFLNCYVSGFHPSDIEVDLLKNGERIEKVEHSDLSFSKDWSFYLLYYTEFTPTEKDEYACRVNHVTLSQPKIVKWDRDPVPSTPPTPSPSTPPTPSPSAS

SEQ ID NO: 200 - protein, 144 aa, Artificial Sequence
  Description of Artificial Sequence: Synthetic polypeptide
AGSGGSGGSGGSPVPSTPPTPSPSTPPTPSPSIQRTPKIQVYSRHPAENGKSNFLNCYVSGFHPSDIEVDLLKNGERIEKVEHSDLSFSKDWSFYLLYYTEFTPTEKDEYACRVNHVTLSQPKIVKWDRDGGSGGSGGSGGSAS

SEQ ID NO: 201 - protein, 242 aa, Artificial Sequence
  Description of Artificial Sequence: Synthetic polypeptide
AGPVPSTPPTPSPSTPPTPSPSIQRTPKIQVYSRHPAENGKSNFLNCYVSGFHPSDIEVDLLKNGERIEKVEHSDLSFSKDWSFYLLYYTEFTPTEKDEYACRVNHVTLSQPKIVKWDRDGGSGGSGGSGGSIQRTPKIQVYSRHPAENGKSNFLNCYVSGFHPSDIEVDLLKNGERIEKVEHSDLSFSKDWSFYLLYYTEFTPTEKDEYACRVNHVTLSQPKIVKWDRDGGSGGSGGSGAS

SEQ ID NO: 202 - protein, 262 aa, Artificial Sequence
  Description of Artificial Sequence: Synthetic polypeptide
AGSGGSGGSGGSPVPSTPPTPSPSTPPTPSPSIQRTPKIQVYSRHPAENGKSNFLNCYVSGFHPSDIEVDLLKNGERIEKVEHSDLSFSKDWSFYLLYYTEFTPTEKDEYACRVNHVTLSQPKIVKWDRDGGSGGSGGSGGSIQRTPKIQVYSRHPAENGKSNFLNCYVSGFHPSDIEVDLLKNGERIEKVEHSDLSFSKDWSFYLLYYTEFTPTEKDEYACRVNHVTLSQPKIVKWDRDPVPSTPPTPSPSTPPTPSPSAS

SEQ ID NO: 203 - protein, 121 aa, Artificial Sequence
  Description of Artificial Sequence: Synthetic polypeptide
AGSGGSGGSGGSPVPSTPPTPSPSTPPTPSPSQIFVKTLTGKTITLEVEPSDTIENVKAKIQDKEGIPPDQQRLIFAGKQLEDGRTLSDYNIQKESTLHLVLRLRGGGGSGGSGGSGGSAS

SEQ ID NO: 204 - protein, 326 aa, Artificial Sequence
  Description of Artificial Sequence: Synthetic polypeptide
AGSGGSGGSGGSPVPSTPPTPSPSTPPTPSPSDGRYSLTYIYTGLSKHVEDVPAFQALGSLNDLQFFRYNSKDRKSQPMGLWRQVEGMEDWKQDSQLQKAREDIFMETLKDIVEYYNDSNGSHVLQGRFGCEIENNRSSGAFWKYYYDGKDYIEFNKEIPAWVPFDPAAQITKQKWEAEPVYVQRAKAYLEEECPATLRKYLKYSKNILDRQDPPSVVVTSHQAPGEKKKLKCLAYDFYPGKIDVHWTRAGEVQEPELRGDVLHNGNGTYQSWVVVAVPPQDTAPYSCHVQHSSLAQPLVVPWEASPVPSTPPTPSPSTPPTPSAS

SEQ ID NO: 205 - protein, 606 aa, Artificial Sequence
  Description of Artificial Sequence: Synthetic polypeptide
AGSGGSGGSGGSGGSGGSGGSGGSDGRYSLTYIYTGLSKHVEDVPAFQALGSLNDLQFFRYNSKDRKSQPMGLWRQVEGMEDWKQDSQLQKAREDIFMETLKDIVEYYNDSNGSHVLQGRFGCEIENNRSSGAFWKYYYDGKDYIEFNKEIPAWVPFDPAAQITKQKWEAEPVYVQRAKAYLEEECPATLRKYLKYSKNILDRQDPPSVVVTSHQAPGEKKKLKCLAYDFYPGKIDVHWTRAGEVQEPELRGDVLHNGNGTYQSWVVVAVPPQDTAPYSCHVQHSSLAQPLVVPWEASGGSGGSGGSGGSDGRYSLTYIYTGLSKHVEDVPAFQALGSLNDLQFFRYNSKDRKSQPMGLWRQVEGMEDWKQDSQLQKAREDIFMETLKDIVEYYNDSNGSHVLQGRFGCEIENNRSSGAFWKYYYDGKDYIEFNKEIPAWVPFDPAAQITKQKWEAEPVYVQRAKAYLEEECPATLRKYLKYSKNILDRQDPPSVVVTSHQAPGEKKKLKCLAYDFYPGKIDVHWTRAGEVQEPELRGDVLHNGNGTYQSWVVVAVPPQDTAPYSCHVQHSSLAQPLVVPWEASPVPSTPPTPSPSTPPTPSPSAS

SEQ ID NO: 206 - protein, 46 aa, Artificial Sequence
  Description of Artificial Sequence: Synthetic polypeptide
AGSGNSSGSGGSGGSGNSSGSGGSPVPSTPPTPSPSTPPTPSPSAS

SEQ ID NO: 207 - protein, 141 aa, Artificial Sequence
  Description of Artificial Sequence: Synthetic polypeptide
KLSGGGGSGGGGSGGGGSAEAWYNLGNAYYKQGDYQKAIEYYQKALELDPNNAEAWYNLGNAYYKQGDYQKAIEYYQKALELDPNNAEAWYNLGNAYYKQGDYQKAIEDYQKALELDPNNLQRSAGGGGSGGGGSGGGGAS

SEQ ID NO: 208 - protein, 245 aa, Artificial Sequence
  Description of Artificial Sequence: Synthetic polypeptide
KLSGGGGSGGGGSGGGGSAEAWYNLGNAYYKQGDYQKAIEYYQKALELDPNNAEAWYNLGNAYYKQGDYQKAIEYYQKALELDPNNAEAWYNLGNAYYKQGDYQKAIEDYQKALELDPNNLQAEAWKNLGNAYYKQGDYQKAIEYYQKALELDPNNASAWYNLGNAYYKQGDYQKAIEYYQKALELDPNNAKAWYRRGNAYYKQGDYQKAIEDYQKALELDPNNRSRSAGGGGSGGGGSGGGGAS

SEQ ID NO: 209 - protein, 349 aa, Artificial Sequence
  Description of Artificial Sequence: Synthetic polypeptide
KLSGGGGSGGGGSGGGGSAEAWYNLGNAYYKQGDYQKAIEYYQKALELDPNNAEAWYNLGNAYYKQGDYQKAIEYYQKALELDPNNAEAWYNLGNAYYKQGDYQKAIEDYQKALELDPNNLQAEAWKNLGNAYYKQGDYQKAIEYYQKALELDPNNASAWYNLGNAYYKQGDYQKAIEYYQKALELDPNNAKAWYRRGNAYYKQGDYQKAIEDYQKALELDPNNRSAEAWYNLGNAYYKQGDYQKAIEYYQKALELDPNNAEAWYNLGNAYYKQGDYQKAIEYYQKALELDPNNAEAWYNLGNAYYKQGDYQKAIEDYQKALELDPNNLQRSAGGGGSGGGGSGGGGAS

SEQ ID NO: 210 - protein, 451 aa, Artificial Sequence
  Description of Artificial Sequence: Synthetic polypeptide
KLSGGGGSGGGGSGGGGSAEAWYNLGNAYYKQGDYQKAIEYYQKALELDPNNAEAWYNLGNAYYKQGDYQKAIEYYQKALELDPNNAEAWYNLGNAYYKQGDYQKAIEDYQKALELDPNNLQAEAWKNLGNAYYKQGDYQKAIEYYQKALELDPNNASAWYNLGNAYYKQGDYQKAIEYYQKALELDPNNAKAWYRRGNAYYKQGDYQKAIEDYQKALELDPNNRSAEAWYNLGNAYYKQGDYQKAIEYYQKALELDPNNAEAWYNLGNAYYKQGDYQKAIEYYQKALELDPNNAEAWYNLGNAYYKQGDYQKAIEDYQKALELDPNNLQAEAWKNLGNAYYKQGDYQKAIEYYQKALELDPNNASAWYNLGNAYYKQGDYQKAIEYYQKALELDPNNAKAWYRRGNAYYKQGDYQKAIEDYQKALELDPNNRSAGGGGSGGGGSGGGGAS

SEQ ID NO: 211 - protein, 7 aa, Artificial Sequence
  Description of Artificial Sequence: Synthetic peptide
GGGGSAS

SEQ ID NO: 212 - protein, 12 aa, Artificial Sequence
  Description of Artificial Sequence: Synthetic peptide
GGGGSGGGGSAS

SEQ ID NO: 213 - protein, 17 aa, Artificial Sequence
  Description of Artificial Sequence: Synthetic peptide
GGGGSGGGGSGGGGSAS

SEQ ID NO: 214 - protein, 27 aa, Artificial Sequence
  Description of Artificial Sequence: Synthetic peptide
GGGGSGGGGSGGGGSGGGGSGGGGSAS

SEQ ID NO: 215 - protein, 32 aa, Artificial Sequence
  Description of Artificial Sequence: Synthetic polypeptide
GGGGSGGGGSGGGGSGGGGSGGGGSGGGGSAS

SEQ ID NO: 216 - protein, 37 aa, Artificial Sequence
  Description of Artificial Sequence: Synthetic polypeptide
AGGGSGGGGSGGGGSGGGGSGGGGSGGGGSGGGGSAS

SEQ ID NO: 217 - protein, 42 aa, Artificial Sequence
  Description of Artificial Sequence: Synthetic polypeptide
AGGGSGGGGSGGGGSGGGGSGGGGSGGGGSGGGGSGGGGSAS

SEQ ID NO: 218 - protein, 47 aa, Artificial Sequence
  Description of Artificial Sequence: Synthetic polypeptide
AGGGSGGGGSGGGGSGGGGSGGGGSGGGGSGGGGSGGGGSGGGGSAS

SEQ ID NO: 219 - protein, 124 aa, Artificial Sequence
  Description of Artificial Sequence: Synthetic polypeptide
QVKLEESGGGSVQTGGSLRLTCAASGRTSRSYGMGWFRQAPGKEREFVSGISWRGDSTGYADSVKGRFTISRDNAKNTVDLQMNSLKPEDTAIYYCAAAAGSAWYGTLYEYDYWGQGTQVTVSS

SEQ ID NO: 220 - protein, 243 aa, Artificial Sequence
  Description of Artificial Sequence: Synthetic polypeptide
QVQLQESGGGVVQPGRSLRLSCAASRFTFSSYAMHWVRQAPGKGLEWVAVISYDGSNKYYADSVKGRFTISRDNSKNTLYLQMNSLRAEDTAVYYCARDLSGYGDYPDYWGQGTLVTVSSGGGGSGGGGSGGGGSSELTQDPAVSVALGQTVRITCQGDSLRSYYASWYQQKPGQAPVLVMYGRNERPSGVPDRFSGSKSGTSASLAISGLQPEDEANYYCAGWDDSLTGPVFGGGTKLTVLG

SEQ ID NO: 221 - protein, 243 aa, Artificial Sequence
  Description of Artificial Sequence: Synthetic polypeptide
QVQLQESGGGVVQPGRSLRLSCAASRFTFNNYAMHWVRQAPGKGLEWVAVISYDGSNKYYADSVKGRFTISRDNSKNTLYLQMNSLRAEDTAVYYCARDLSGYGDYPDYWGQGTLVTVSSGGGGSGGGGSGGGGSSELTQDPAVSVALGQTVRITCQGDSLRSYYASWYQQKPGQAPVLVMYGRNERPSGVPDRFSGSKSGTSASLAISGLQPEDEANYYCAGWDDSLTGPVFGGGTKLTVLG

SEQ ID NO: 222 - protein, 243 aa, Artificial Sequence
  Description of Artificial Sequence: Synthetic polypeptide
QVQLQESGGGVVQPGRSLRLSCAASRYPFHHHDHHWVRQAPGKGLEWVAVISYDGSNKYYADSVKGRFTISRDNSKNTLYLQMNSLRAEDTAVYYCARDLSGYGDYPDYWGQGTLVTVSSGGGGSGGGGSGGGGSSELTQDPAVSVALGQTVRITCQGDSLRSYYASWYQQKPGQAPVLVMYGRNERPSGVPDRFSGSKSGTSASLAISGLQPEDEANYYCAGWDDSLTGPVFGGGTKLTVLG

SEQ ID NO: 223 - protein, 15 aa, Artificial Sequence
  Description of Artificial Sequence: Synthetic peptide
GGGGSGGGGSGGGGS

SEQ ID NO: 224 - protein, 20 aa, Artificial Sequence
  Description of Artificial Sequence: Synthetic peptide
GGGGSGGGGSGGGGSGGGGS

SEQ ID NO: 225 - protein, 5 aa, Artificial Sequence
  Description of Artificial Sequence: Synthetic peptide
GGGGS

SEQ ID NO: 226 - protein, 24 aa, Artificial Sequence
  Description of Artificial Sequence: Synthetic peptide
GSPVPSTPPTPSPSTPPTPSPSAS

SEQ ID NO: 227 - protein, 45 aa, Artificial Sequence
  Description of Artificial Sequence: Synthetic polypeptide
LKEAKEKAIEELKKAGITSDYYFDLINKAKAVEGVNALKDEILKA

SEQ ID NO: 228 - protein, 11 aa, Artificial Sequence
  Description of Artificial Sequence: Synthetic peptide
GGGGSHHHHHH

SEQ ID NO: 229 - protein, 192 aa, Artificial Sequence
  Description of Artificial Sequence: Synthetic polypeptide
GSQDSTSDLIPAPPLSKVPLQQNFQDNQFQGKWYVVGLAGNAILREDKDPQKMYATIYELKEDKSYNVTSVLFRKKKCDYWIRTFVPGSQPGEFTLGNIKSYPGLTSYLVRVVSTNYNQHAMVFFKKVSQNREYFKITLYGRTKELTSELKENFIRFSKSLGLPENHIVFPVPIDQCIDGGGSRRRRKRSGS

SEQ ID NO: 230 - protein, 20 aa, Artificial Sequence
  Description of Artificial Sequence: Synthetic peptide
METDTLLLWVLLLWVPGSTG

SEQ ID NO: 231 - protein, 212 aa, Artificial Sequence
  Description of Artificial Sequence: Synthetic polypeptide
METDTLLLWVLLLWVPGSTGGSQDSTSDLIPAPPLSKVPLQQNFQDNQFQGKWYVVGLAGNAILREDKDPQKMYATIYELKEDKSYNVTSVLFRKKKCDYWIRTFVPGSQPGEFTLGNIKSYPGLTSYLVRVVSTNYNQHAMVFFKKVSQNREYFKITLYGRTKELTSELKENFIRFSKSLGLPENHIVFPVPIDQCIDGGGSRRRRKRSGS

SEQ ID NO: 232 - protein, 49 aa, Artificial Sequence
  Description of Artificial Sequence: Synthetic polypeptide
REGCASHCTKYKAELEKCEARVSSRSNTEETCVQELFDFLHCVDHCVSQ

SEQ ID NO: 233 - protein, 49 aa, Artificial Sequence
  Description of Artificial Sequence: Synthetic polypeptide
EHDCKVHCVKEWMAGHACAERQKSYTIGRAHCSGQKFDVFKCLDHCAAP

SEQ ID NO: 234 - protein, 49 aa, Artificial Sequence
  Description of Artificial Sequence: Synthetic polypeptide
EHDCKVHCVKEWMAGKACAERQKSYTIGRAHCSGQKFDVFKCLDHCAAP

SEQ ID NO: 235 - protein, 49 aa, Artificial Sequence
  Description of Artificial Sequence: Synthetic polypeptide
EEDCKVHCVKEWHAGKACAERQKSYTIGRAHCSGQKFDVFKCLDHCAAP

SEQ ID NO: 236 - protein, 49 aa, Artificial Sequence
  Description of Artificial Sequence: Synthetic polypeptide
EEDCKVHCVKEWMAGHACAERQKSYTIGRAHCSGQKFDVFKCLDHCAAP

SEQ ID NO: 237 - protein, 49 aa, Artificial Sequence
  Description of Artificial Sequence: Synthetic polypeptide
EHDCKVHCVKEWHAGKACAERQKSYTIGRAHCSGQKFDVFKCLDHCAAP

SEQ ID NO: 238 - protein, 49 aa, Artificial Sequence
  Description of Artificial Sequence: Synthetic polypeptide
EEDCKVHCVKEWHAGHACAERQKSYTIGRAHCSGQKFDVFKCLDHCAAP

SEQ ID NO: 239 - protein, 49 aa, Artificial Sequence
  Description of Artificial Sequence: Synthetic polypeptide
EHDCKVHCVKEWHAGHACAERQKSYTIGRAHCSGQKFDVFKCLDHCAAP

SEQ ID NO: 240 - protein, 115 aa, Artificial Sequence [sequence omitted]

SEQ ID NO: 241 - protein, 241 aa, Artificial Sequence
  Description of Artificial Sequence: Synthetic polypeptide
DIVLTQSPATLSLSPGERATLSCRATESVEYYGTSLVQWYQQKPGQPPKLLIYAASSVDSGVPSRFSGSGSGTDFTLTINSLEAEDAATYFCQQSRRVPYTFGQGTKLEIKGGGGSGGGGSGGGGSEVQLVQSGAEVKKPGASVKMSCKASGYTFTSYVMHWVKQAPGQRLEWIGYVNPFNDGTKYNEMFKGRATLTSDKSTSTAYMELSSLRSEDTAVYYCARQAWGYPWGQGTLVTVSS

SEQ ID NO: 242 - protein, 124 aa, Artificial Sequence
  Description of Artificial Sequence: Synthetic polypeptide
QVKLEESGGGSVQTGGSLRLTCAASGHTSRSYGMGWFRQAPGKEREFVSGISWRGDSTGYADSVKGRFTISRDNAKNTVDLQMNSLKPEDTAIYYCAAAAGSAWYHTLYEYDYWGQGTQVTVSS

SEQ ID NO: 243 - protein, 124 aa, Artificial Sequence
  Description of Artificial Sequence: Synthetic polypeptide
QVKLEESGGGSVQTGGSLRLTCAASGHTSRSYGMHWFRQAPGKEREFVSGISWRGDSTGYADSVKGRFTISRDNAKNTVDLQMNSLKPEDTAIYYCAAAAGSHWYGTHYEYDYWGQGTQVTVSS

SEQ ID NO: 244 - protein, 53 aa, Artificial Sequence
  Description of Artificial Sequence: Synthetic polypeptide
NSDSECPLSHDGYCLHGGVCMYIKAVDRYACNCVVGYIGERCQYRDLTWWGPR

SEQ ID NO: 245 - protein, 232 aa, Artificial Sequence
  Description of Artificial Sequence: Synthetic polypeptide
EPKSCDKTHTCPPCPAPELLGGPSVFLFPPKPKDTLMISRTPEVTCVVVDVSHEDPEVKFNWYVDGVEVHNAKTKPREEQYNSTYRVVSVLTVLHQDWLNGKEYKCKVSNKALPAPIEKTISKAKGQPREPQVYTLPPSRDELTKNQVSLTCLVKGFYPSDIAVEWESNGQPENNYKTTPPVLDSDGSFFLYSKLTVDKSRWQQGNVFSCSVMHEALHNHYTQKSLSLSPGK

SEQ ID NO: 246 - protein, 232 aa, Artificial Sequence
  Description of Artificial Sequence: Synthetic polypeptide
EPKSSDKTHTCPPCPAPELLGGPSVFLFPPKPKDTLMISRTPEVTCVVVDVSHEDPEVKFNWYVDGVEVHNAKTKPREEQYNSTYRVVSVLTVLHQDWLNGKEYKCKVSNKALPAPIEKTISKAKGQPREPQVYTLPPSRDELTKNQVSLTCLVKGFYPSDIAVEWESNGQPENNYKTTPPVLDSDGSFFLYSKLTVDKSRWQQGNVFSCSVMHEALHNHYTQKSLSLSPGK

SEQ ID NO: 247 - protein, 232 aa, Artificial Sequence
  Description of Artificial Sequence: Synthetic polypeptide
EPKSCDKTHTCPPCPAPEAAGGPSVFLFPPKPKDTLMISRTPEVTCVVVDVSHEDPEVKFNWYVDGVEVHNAKTKPREEQYNSTYRVVSVLTVLHQDWLNGKEYKCKVSNKALGAPIEKTISKAKGQPREPQVYTLPPSRDELTKNQVSLTCLVKGFYPSDIAVEWESNGQPENNYKTTPPVLDSDGSFFLYSKLTVDKSRWQQGNVFSCSVMHEALHNHYTQKSLSLSPGK

SEQ ID NO: 248 - protein, 232 aa, Artificial Sequence
  Description of Artificial Sequence: Synthetic polypeptide
EPKSCDKTHTCPPCPAPELLGGPSVFLFPPKPKDTLMISRTPEVTCVVVDVSHEDPEVKFNWYVDGVEVHNAKTKPREEQYASTYRVVSVLTVLHQDWLNGKEYKCKVSNKALPAPIEKTISKAKGQPREPQVYTLPPSRDELTKNQVSLTCLVKGFYPSDIAVEWESNGQPENNYKTTPPVLDSDGSFFLYSKLTVDKSRWQQGNVFSCSVMHEALHNHYTQKSLSLSPGK

SEQ ID NO: 249 - protein, 232 aa, Artificial Sequence
  Description of Artificial Sequence: Synthetic polypeptide
EPKSCDKTHTCPPCPAPELLGGPSVFLFPPKPKDTLMISRTPEVTCVVVDVSHEDPEVKFNWYVDGVEVHNAKTKPREEQYNSTYRVVSVLTVLHQDWLNGKEYKCKVSNKALPAPIEKTISKAKGQPREPQVYTLPPSREEMTKNQVSLTCLVKGFYPSDIAVEWESNGQPENNYKTTPPVLDSDGSFFLYSKLTVDKSRWQQGNVFSCSVMHEALHNHYTQKSLSLSPGK

SEQ ID NO: 250 - protein, 232 aa, Artificial Sequence
  Description of Artificial Sequence: Synthetic polypeptide
EPKSSDKTHTCPPCPAPEAAGGPSVFLFPPKPKDTLMISRTPEVTCVVVDVSHEDPEVKFNWYVDGVEVHNAKTKPREEQYNSTYRVVSVLTVLHQDWLNGKEYKCKVSNKALGAPIEKTISKAKGQPREPQVYTLPPSREEMTKNQVSLTCLVKGFYPSDIAVEWESNGQPENNYKTTPPVLDSDGSFFLYSKLTVDKSRWQQGNVFSCSVMHEALHNHYTQKSLSLSPGK

SEQ ID NO: 251 - protein, 232 aa, Artificial Sequence
  Description of Artificial Sequence: Synthetic polypeptide
EPKSSDKTHTCPPCPAPEAAGGPSVFLFPPKPKDTLMISRTPEVTCVVVDVSHEDPEVKFNWYVDGVEVHNAKTKPREEQYNSTYRVVSVLTVLHQDWLNGKEYKCKVSNKALGAPIEKTISKAKGQPREPQVYTLPPSREEMTKNQVSLWCLVKGFYPSDIAVEWESNGQPENNYKTTPPVLDSDGSFFLYSKLTVDKSRWQQGNVFSCSVMHEALHNHYTQKSLSLSPGK

SEQ ID NO: 252 - protein, 232 aa, Artificial Sequence
  Description of Artificial Sequence: Synthetic polypeptide
EPKSSDKTHTCPPCPAPEAAGGPSVFLFPPKPKDTLMISRTPEVTCVVVDVSHEDPEVKFNWYVDGVEVHNAKTKPREEQYNSTYRVVSVLTVLHQDWLNGKEYKCKVSNKALGAPIEKTISKAKGQPREPQVYTLPPSREEMTKNQVSLSCAVKGFYPSDIAVEWESNGQPENNYKTTPPVLDSDGSFFLVSKLTVDKSRWQQGNVFSCSVMHEALHNHYTQKSLSLSPGK

SEQ ID NO: 253 - protein, 232 aa, Artificial Sequence
  Description of Artificial Sequence: Synthetic polypeptide
EPKSSDKTHTCPPCPAPEAAGGPSVFLFPPKPKDTLMISRTPEVTCVVVDVSHEDPEVKFNWYVDGVEVHNAKTKPREEQYASTYRVVSVLTVLHQDWLNGKEYKCKVSNKALGAPIEKTISKAKGQPREPQVYTLPPSREEMTKNQVSLTCLVKGFYPSDIAVEWESNGQPENNYKTTPPVLDSDGSFFLYSKLTVDKSRWQQGNVFSCSVMHEALHNHYTQKSLSLSPGK

SEQ ID NO: 254 - protein, 232 aa, Artificial Sequence
  Description of Artificial Sequence: Synthetic polypeptide
EPKSSDKTHTCPPCPAPEAAGGPSVFLFPPKPKDTLMISRTPEVTCVVVDVSHEDPEVKFNWYVDGVEVHNAKTKPREEQYASTYRVVSVLTVLHQDWLNGKEYKCKVSNKALGAPIEKTISKAKGQPREPQVYTLPPSREEMTKNQVSLWCLVKGFYPSDIAVEWESNGQPENNYKTTPPVLDSDGSFFLYSKLTVDKSRWQQGNVFSCSVMHEALHNHYTQKSLSLSPGK

SEQ ID NO: 255 - protein, 232 aa, Artificial Sequence
  Description of Artificial Sequence: Synthetic polypeptide
EPKSSDKTHTCPPCPAPEAAGGPSVFLFPPKPKDTLMISRTPEVTCVVVDVSHEDPEVKFNWYVDGVEVHNAKTKPREEQYASTYRVVSVLTVLHQDWLNGKEYKCKVSNKALGAPIEKTISKAKGQPREPQVYTLPPSREEMTKNQVSLSCAVKGFYPSDIAVEWESNGQPENNYKTTPPVLDSDGSFFLVSKLTVDKSRWQQGNVFSCSVMHEALHNHYTQKSLSLSPGK

SEQ ID NO: 256 - protein, 232 aa, Artificial Sequence
  Description of Artificial Sequence: Synthetic polypeptide
EPKSCDKTHTCPPCPAPELLGGPSVFLFPPKPKDTLMISRTPEVTCVVVDVSHEDPEVKFNWYVDGVEVHNAKTKPREEQYASTYRVVSVLTVLHQDWLNGKEYKCKVSNKALPAPIEKTISKAKGQPREPQVYTLPPSREEMTKNQVSLTCLVKGFYPSDIAVEWESNGQPENNYKTTPPVLDSDGSFFLYSKLTVDKSRWQQGNVFSCSVMHEALHNHYTQKSLSLSPGK

SEQ ID NO: 257 - protein, 232 aa, Artificial Sequence; identical to SEQ ID NO: 249
  Description of Artificial Sequence: Synthetic polypeptide

SEQ ID NO: 258 - protein, 232 aa, Artificial Sequence
  Description of Artificial Sequence: Synthetic polypeptide
EPKSSDKTHTCPPCPAPELLGGPSVFLFPPKPKDTLMISRTPEVTCVVVDVSHEDPEVKFNWYVDGVEVHNAKTKPREEQYASTYRVVSVLTVLHQDWLNGKEYKCKVSNKALGAPIEKTISKAKGQPREPQVYTLPPSRDELTKNQVSLWCLVKGFYPSDIAVEWESNGQPENNYKTTPPVLDSDGSFFLYSKLTVDKSRWQQGNVFSCSVMHEALHNHYTQKSLSLSPGK

SEQ ID NO: 259 - protein, 232 aa, Artificial Sequence
  Description of Artificial Sequence: Synthetic polypeptide
EPKSSDKTHTCPPCPAPELLGGPSVFLFPPKPKDTLMISRTPEVTCVVVDVSHEDPEVKFNWYVDGVEVHNAKTKPREEQYASTYRVVSVLTVLHQDWLNGKEYKCKVSNKALGAPIEKTISKAKGQPREPQVYTLPPSRDELTKNQVSLSCAVKGFYPSDIAVEWESNGQPENNYKTTPPVLDSDGSFFLVSKLTVDKSRWQQGNVFSCSVMHEALHNHYTQKSLSLSPGK

SEQ ID NO: 260 - protein, 232 aa, Artificial Sequence
  Description of Artificial Sequence: Synthetic polypeptide
EPKSCDKTHTCPPCPAPELLGGPSVFLFPPKPKDTLMISRTPEVTCVVVDVSHEDPEVKFNWYVDGVEVHNAKTKPREEQYNSTYRVVSVLTVLHQDWLNGKEYKCKVSNKALPAPIEKTISKAKGQPREPQVYTLPPSRDELTKNQVSLWCLVKGFYPSDIAVEWESNGQPENNYKTTPPVLDSDGSFFLYSKLTVDKSRWQQGNVFSCSVMHEALHNHYTQKSLSLSPGK

SEQ ID NO: 261 - protein, 232 aa, Artificial Sequence
  Description of Artificial Sequence: Synthetic polypeptide
EPKSCDKTHTCPPCPAPELLGGPSVFLFPPKPKDTLMISRTPEVTCVVVDVSHEDPEVKFNWYVDGVEVHNAKTKPREEQYNSTYRVVSVLTVLHQDWLNGKEYKCKVSNKALPAPIEKTISKAKGQPREPQVYTLPPSRDELTKNQVSLSCAVKGFYPSDIAVEWESNGQPENNYKTTPPVLDSDGSFFLVSKLTVDKSRWQQGNVFSCSVMHEALHNHYTQKSLSLSPGK

SEQ ID NO: 262 - protein, 232 aa, Artificial Sequence
  Description of Artificial Sequence: Synthetic polypeptide
EPKSCDKTHTCPPCPAPELLGGPSVFLFPPKPKDTLMISRTPEVTCVVVDVSHEDPEVKFNWYVDGVEVHNAKTKPREEQYNSTYRVVSVLTVLHQDWLNGKEYKCKVSNKALPAPIEKTISKAKGQPREPQVYTLPPCRDELTKNQVSLWCLVKGFYPSDIAVEWESNGQPENNYKTTPPVLDSDGSFFLYSKLTVDKSRWQQGNVFSCSVMHEALHNHYTQKSLSLSPGK

SEQ ID NO: 263 - protein, 232 aa, Artificial Sequence
  Description of Artificial Sequence: Synthetic polypeptide
EPKSCDKTHTCPPCPAPELLGGPSVFLFPPKPKDTLMISRTPEVTCVVVDVSHEDPEVKFNWYVDGVEVHNAKTKPREEQYNSTYRVVSVLTVLHQDWLNGKEYKCKVSNKALPAPIEKTISKAKGQPREPQVCTLPPSRDELTKNQVSLSCAVKGFYPSDIAVEWESNGQPENNYKTTPPVLDSDGSFFLVSKLTVDKSRWQQGNVFSCSVMHEALHNHYTQKSLSLSPGK

SEQ ID NO: 264 - protein, 232 aa, Artificial Sequence
  Description of Artificial Sequence: Synthetic polypeptide
EPKSCDKTHTCPPCPAPELLGGPSVFLFPPKPKDTLMISRTPEVTCVVVDVSHEDPEVKFNWYVDGVEVHNAKTKPREEQYNSTYRVVSVLTVLHQDWLNGKEYKCKVSNKALPAPIEKTISKAKGQPREPQVYTLPPSRDELTKNQVSLTCLVKGFYPSDIAVEWESNGQPENNYDTTPPVLDSDGSFFLYSDLTVDKSRWQQGNVFSCSVMHEALHNHYTQKSLSLSPGK

SEQ ID NO: 265 - protein, 232 aa, Artificial Sequence
  Description of Artificial Sequence: Synthetic polypeptide
EPKSCDKTHTCPPCPAPELLGGPSVFLFPPKPKDTLMISRTPEVTCVVVDVSHEDPEVKFNWYVDGVEVHNAKTKPREEQYNSTYRVVSVLTVLHQDWLNGKEYKCKVSNKALPAPIEKTISKAKGQPREPQVYTLPPSRKELTKNQVSLTCLVKGFYPSDIAVEWESNGQPENNYKTTPPVLKSDGSFFLYSKLTVDKSRWQQGNVFSCSVMHEALHNHYTQKSLSLSPGK

SEQ ID NO: 266 - protein, 232 aa, Artificial Sequence
  Description of Artificial Sequence: Synthetic polypeptide
EPKSCDKTHTCPPCPAPELLGGPSVFLFPPKPKDTLMISRTPEVTCVVVDVSHEDPEVKFNWYVDGVEVHNAKTKPREEQYNSTYRVVSVLTVLHQDWLNGKEYKCKVSNKALPAPIEKTISKAKGQPREPQVYTLPPSRDELTKNQVHLTCLVKGFYPSDIAVEWESNGQPENNYKTTPPVLDSDGSFALYSKLTVDKSRWQQGNVFSCSVMHEALHNHYTQKSLSLSPGK

SEQ ID NO: 267 - protein, 232 aa, Artificial Sequence
  Description of Artificial Sequence: Synthetic polypeptide
EPKSCDKTHTCPPCPAPELLGGPSVFLFPPKPKDTLMISRTPEVTCVVVDVSHEDPEVKFNWYVDGVEVHNAKTKPREEQYNSTYRVVSVLTVLHQDWLNGKEYKCKVSNKALPAPIEKTISKAKGQPREPQVTTLPPSRDELTKNQVSLTCLVKGFYPSDIAVEWESNGQPENNYKTFPPVLDSDGSFFLYSKLTVDKSRWQQGNVFSCSVMHEALHNHYTQKSLSLSPGK

SEQ ID NO: 268 - protein, 232 aa, Artificial Sequence
  Description of Artificial Sequence: Synthetic polypeptide
EPKSCEKTHTCPECPAPELLGGPSVFLFPPKPKDTLMISRTPEVTCVVVDVSHEDPEVKFNWYVDGVEVHNAKTKPREEQYNSTYRVVSVLTVLHQDWLNGKEYKCKVSNKALPAPIEKTISKAKGQPREPQVYTLPPSRDELTKNQVSLTCEVKGFYPSDIAVEWESNGQPENNYKTTPPVLDSDGSFFLYSKLTVDKSRWQQGNVFSCSVMHEALHNHYTQKSLSLSPGK

SEQ ID NO: 269 - protein, 232 aa, Artificial Sequence
  Description of Artificial Sequence: Synthetic polypeptide
EPKSCRKTHTCPRCPAPELLGGPSVFLFPPKPKDTLMISRTPEVTCVVVDVSHEDPEVKFNWYVDGVEVHNAKTKPREEQYNSTYRVVSVLTVLHQDWLNGKEYKCKVSNKALPAPIEKTISKAKGQPREPQVYTLPPSRDELTKNQVSLTCLVKGFYPSDIAVEWESNGQPENNYKTTPPVLDSDGSFFLYSRLTVDKSRWQQGNVFSCSVMHEALHNHYTQKSLSLSPGK

SEQ ID NO: 270 - protein, 232 aa, Artificial Sequence
  Description of Artificial Sequence: Synthetic polypeptide
EPKSCDKTHTCPPCPAPELLGGPSVFLFPPKPKDTLMISRTPEVTCVVVDVSHEDPEVKFNWYVDGVEVHNAKTKPREEQYNSTYRVVSVLTVLHQDWLNGKEYKCKVSNKALPAPIEKTISKAKGQPREPQVYTLPPSRDELTKNQVSLTCLVKGFYPSDIAVEWESNGQPENNYKTTPPVLDSDGSFLLYSKLTVDKSRWQQGNVFSCSVMHEALHNHYTQKSLSLSPGK

SEQ ID NO: 271 - protein, 232 aa, Artificial Sequence
  Description of Artificial Sequence: Synthetic polypeptide
EPKSCDKTHTCPPCPAPELLGGPSVFLFPPKPKDTLMISRTPEVTCVVVDVSHEDPEVKFNWYVDGVEVHNAKTKPREEQYNSTYRVVSVLTVLHQDWLNGKEYKCKVSNKALPAPIEKTISKAKGQPREPQVYTLPPSRDELTKNQVSLTCLVKGFYPSDIAVEWESNGQPENNYKTTPPVLDSDGSFFLYSRLTVDKSRWQQGNVFSCSVMHEALHNHYTQKSLSLSPGK

SEQ ID NO: 272 - protein, 232 aa, Artificial Sequence
  Description of Artificial Sequence: Synthetic polypeptide
EPKSCDKTHTCPPCPAPELLGGPSVFLFPPKPKDTLMISRTPEVTCVVVDVSHEDPEVKFNWYVDGVEVHNAKTKPREEQYNSTYRVVSVLTVLHQDWLNGKEYKCKVSNKALPAPIEKTISKAKGQPREPQVYVLPPSRDELTKNQVSLLCLVKGFYPSDIAVEWESNGQPENNYLTWPPVLDSDGSFFLYSKLTVDKSRWQQGNVFSCSVMHEALHNHYTQKSLSLSPGK

SEQ ID NO: 273 - protein, 232 aa, Artificial Sequence
  Description of Artificial Sequence: Synthetic polypeptide
EPKSCDKTHTCPPCPAPELLGGPSVFLFPPKPKDTLMISRTPEVTCVVVDVSHEDPEVKFNWYVDGVEVHNAKTKPREEQYNSTYRVVSVLTVLHQDWLNGKEYKCKVSNKALPAPIEKTISKAKGQPREPQVYVYPPSRDELTKNQVSLTCLVKGFYPSDIAVEWESNGQPENNYKTTPPVLDSDGSFALVSKLTVDKSRWQQGNVFSCSVMHEALHNHYTQKSLSLSPGK

SEQ ID NO: 274 - protein, 232 aa, Artificial Sequence
  Description of Artificial Sequence: Synthetic polypeptide
EPKSCDKTHTCPPCPAPELLGGPSVFLFPPKPKDTLMISRTPEVTCVVVDVSHEDPEVKFNWYVDGVEVHNAKTKPREEQYNSTYRVVSVLTVLHQDWLNGKEYKCKVSNKALPAPIEKTISKAKGQPREPQVYTLPPSRDELTENQVSLTCLVKGFYPSDIAVEWESNGQPENNYKTTPPVLDSDGSFFLYSWLTVDKSRWQQGNVFSCSVMHEALHNHYTQKSLSLSPGK

SEQ ID NO: 275 - protein, 232 aa, Artificial Sequence
  Description of Artificial Sequence: Synthetic polypeptide
EPKSCDKTHTCPPCPAPELLGGPSVFLFPPKPKDTLMISRTPEVTCVVVDVSHEDPEVKFNWYVDGVEVHNAKTKPREEQYNSTYRVVSVLTVLHQDWLNGKEYKCKVSNKALPAPIEKTISKAKGQPREPRVYTLPPSRDELTKNQVSLTCLVKGFYPSDIAVEWESNGQPENNYKTTPPVLVSDGSFTLYSKLTVDKSRWQQGNVFSCSVMHEALHNHYTQKSLSLSPGK

SEQ ID NO: 276 - protein, 232 aa, Artificial Sequence
  Description of Artificial Sequence: Synthetic polypeptide
EPKSCDKTHTCPPCPAPELLGGPSVFLFPPKPKDTLMISRTPEVTCVVVDVSHEDPEVKFNWYVDGVEVHNAKTKPREEQYNSTYRVVSVLTVLHQDWLNGKEYKCKVSNKALPAPIEKTISKAKGQPREPQVCTLPPSRDELTENQVSLTCLVKGFYPSDIAVEWESNGQPENNYKTTPPVLDSDGSFFLYSWLTVDKSRWQQGNVFSCSVMHEALHNHYTQKSLSLSPGK

SEQ ID NO: 277 - protein, 232 aa, Artificial Sequence
  Description of Artificial Sequence: Synthetic polypeptide
EPKSCDKTHTCPPCPAPELLGGPSVFLFPPKPKDTLMISRTPEVTCVVVDVSHEDPEVKFNWYVDGVEVHNAKTKPREEQYNSTYRVVSVLTVLHQDWLNGKEYKCKVSNKALPAPIEKTISKAKGQPREPRVYTLPPCRDELTKNQVSLTCLVKGFYPSDIAVEWESNGQPENNYKTTPPVLVSDGSFTLYSKLTVDKSRWQQGNVFSCSVMHEALHNHYTQKSLSLSPGK

SEQ ID NO: 278 - protein, 232 aa, Artificial Sequence
  Description of Artificial Sequence: Synthetic polypeptide
EPKSCDKTHTCPPCPAPELLGGPSVFLFPPKPKDTLMISRTPEVTCVVVDVSHEDPEVKFNWYVDGVEVHNAKTKPREEQYNSTYRVVSVLTVLHQDWLNGKEYKCKVSNKALPAPIEKTISKAKGQPREPQVYTLPPSRDELTKNQVSLTCLVEGFYPSDIAVEWESNGQPENNYKTTPPVLDSDGSFFLYSWLTVDKSRWQQGNVFSCSVMHEALHNHYTQKSLSLSPGK

SEQ ID NO: 279 - protein, 232 aa, Artificial Sequence
  Description of Artificial Sequence: Synthetic polypeptide
EPKSCDKTHTCPPCPAPELLGGPSVFLFPPKPKDTLMISRTPEVTCVVVDVSHEDPEVKFNWYVDGVEVHNAKTKPREEQYNSTYRVVSVLTVLHQDWLNGKEYKCKVSNKALPAPIEKTISKAKGQPREPQVYTLPPSRDNLTKNQVSLTCLVKGFYPSDIAVEWESNGQPENNYKTTPPVLVSDGSFTLYSKLTVDKSRWQQGNVFSCSVMHEALHNHYTQKSLSLSPGK

SEQ ID NO: 280 - protein, 232 aa, Artificial Sequence
  Description of Artificial Sequence: Synthetic polypeptide
EPKSCDKTHTCPPCPAPELLGGPSVFLFPPKPKDTLMISRTPEVTCVVVDVSHEDPEVKFNWYVDGVEVHNAKTKPREEQYNSTYRVVSVLTVLHQDWLNGKEYKCKVSNKALPAPIEKTISKAKGQPREPQVYTLPPSRDELTDNQVSLTCLVKGFYPSDIAVEWESNGQPENNYKTTPPVLMSDGSFFLASKLTVDKSRWQQGNVFSCSVMHEALHNHYTQKSLSLSPGK

SEQ ID NO: 281 - protein, 232 aa, Artificial Sequence
  Description of Artificial Sequence: Synthetic polypeptide
EPKSCDKTHTCPPCPAPELLGGPSVFLFPPKPKDTLMISRTPEVTCVVVDVSHEDPEVKFNWYVDGVEVHNAKTKPREEQYNSTYRVVSVLTVLHQDWLNGKEYKCKVSNKALPAPIEKTISKAKGQPRRPRVYTLPPSRDELTKNQVSLVCLVKGFYPSDIAVEWESNGQPENNYKTTPPVLDSDGSFFLYSVLTVDKSRWQQGNVFSCSVMHEALHNHYTQKSLSLSPGK

SEQ ID NO: 282 - protein, 232 aa, Artificial Sequence
  Description of Artificial Sequence: Synthetic polypeptide
EPKSCDKTHTCPPCPAPELLGGPSVFLFPPKPKDTLMISRTPEVTCVVVDVSHEDPEVKFNWYVDGVEVHNAKTKPREEQYNSTYRVVSVLTVLHQDWLNGKEYKCKVSNKALPAPIEKTISKAKGQPREPQVSTLPPSRDELTKNQVSLMCLVYGFYPSDIAVEWESNGQPENNYKTTPPVLDSDGSFFLYSVLTVDKSRWQQGNVFSCSVMHEALHNHYTQKSLSLSPGK

SEQ ID NO: 283 - protein, 232 aa, Artificial Sequence
  Description of Artificial Sequence: Synthetic polypeptide
EPKSCDKTHTCPPCPAPELLGGPSVFLFPPKPKDTLMISRTPEVTCVVVDVSHEDPEVKFNWYVDGVEVHNAKTKPREEQYNSTYRVVSVLTVLHQDWLNGKEYKCKVSNKALPAPIEKTISKAKGQPREPQVYTLPPSRGDLTKNQVQLTCLVKGFYPSDIAVEWESNGQPENNYKTTPPVLDSDGSFFLASKLTVDKSRWQQGNVFSCSVMHEALHNHYTQKSLSLSPGK

SEQ ID NO: 284 - protein, 232 aa, Artificial Sequence
  Description of Artificial Sequence: Synthetic polypeptide
EPKSCDKTHTCPPCPAPELLGGPSVFLFPPKPKDTLMISRTPEVTCVVVDVSHEDPEVKFNWYVDGVEVHNAKTKPREEQYNSTYRVVSVLTVLHQDWLNGKEYKCKVSNKALPAPIEKTISKAKGQPREPQVYTDPPSRDELTKNQVSLTCEVKGFYPSDIAVEWESNGQPENNYKTTPPVLDSDGSFFLYSKLTVDKSRWQQGNVFSCSVMHEALHNHYTQKSLSLSPGK

SEQ ID NO: 285 - protein, 232 aa, Artificial Sequence
  Description of Artificial Sequence: Synthetic polypeptide
EPKSCDKTHTCPPCPAPELLGGPSVFLFPPKPKDTLMISRTPEVTCVVVDVSHEDPEVKFNWYVDGVEVHNAKTKPREEQYNSTYRVVSVLTVLHQDWLNGKEYKCKVSNKALPAPIEKTISKAKGQPREPQVYTKPPSRDELTKNQVSLKCLVKGFYPSDIAVEWESNGQPENNYKTTPPVLDSDGSFFLYSKLTVDKSRWQQGNVFSCSVMHEALHNHYTQKSLSLSPGK

SEQ ID NO: 286 - protein, 232 aa, Artificial Sequence
  Description of Artificial Sequence: Synthetic polypeptide
EPKSCDKTHTCPPCPAPELLGGPSVFLFPPKPKDTLMISRTPEVTCVVVDVSHEDPEVKFNWYVDGVEVHNAKTKPREEQYNSTYRVVSVLTVLHQDWLNGKEYKCKVSNKALPAPIEKTISKAKGQPREPQVYTLPPSRDELTKNQVSLTCDVSGFYPSDIAVEWESNGQPENNYKTTPPVLDSDGSFFLYSKLTVDKSRWQQGNVFSCSVMHEALHNHYTQKSLSLSPGK

SEQ ID NO: 287 - protein, 232 aa, Artificial Sequence
  Description of Artificial Sequence: Synthetic polypeptide
EPKSCDKTHTCPPCPAPELLGGPSVFLFPPKPKDTLMISRTPEVTCVVVDVSHEDPEVKFNWYVDGVEVHNAKTKPREEQYNSTYRVVSVLTVLHQDWLNGKEYKCKVSNKALPAPIEKTISKAKGQPREPQVYTLPPSRDQLTKNQVKLTCLVKGFYPSDIAVEWESNGQPENNYKTTPPVLDSDGSFFLYSKLTVDKSRWQQGNVFSCSVMHEALHNHYTQKSLSLSPGK

SEQ ID NO: 288 - protein, 188 aa, Artificial Sequence
  Description of Artificial Sequence: Synthetic polypeptide
REGCASRCMKYNDELEKCEARMMSMSNTEEDCEQELEDLLYCLDHCHSQGGGGSGGGGSGGGGSQVKLEESGGGSVQTGGSLRLTCAASGHTSRSYGMHWFRQAPGKEREFVSGISWRGDSTGYADSVKGRFTISRDNAKNTVDLQMNSLKPEDTAIYYCAAAAGSHWYGTHYEYDYWGQGTQVTVSS

SEQ ID NO: 289 - protein, 382 aa, Artificial Sequence
  Description of Artificial Sequence: Synthetic polypeptide
QVQLQESGGGVVQPGRSLRLSCAASRFTFNNYAMHWVRQAPGKGLEWVAVISYDGSNKYYADSVKGRFTISRDNSKNTLYLQMNSLRAEDTAVYYCARDLSGYGDYPDYWGQGTLVTVSSGGGGSGGGGSGGGGSSELTQDPAVSVALGQTVRITCQGDSLRSYYASWYQQKPGQAPVLVMYGRNERPSGVPDRFSGSKSGTSASLAISGLQPEDEANYYCAGWDDSLTGPVFGGGTKLTVLGGGGGSGGGGSGGGGSQVKLEESGGGSVQTGGSLRLTCAASGHTSRSYGMHWFRQAPGKEREFVSGISWRGDSTGYADSVKGRFTISRDNAKNTVDLQMNSLKPEDTAIYYCAAAAGSHWYGTHYEYDYWGQGTQVTVSS

SEQ ID NO: 290 - protein, 113 aa, Artificial Sequence
  Description of Artificial Sequence: Synthetic polypeptide
REGCASRCMKYNDELEKCEARMMSMSNTEEDCEQELEDLLYCLDHCHSQGGGGSGGGGSGGGGSEHDCKVHCVKEWMAGHACAERQKSYTIGRAHCSGQKFDVFKCLDHCAAP

SEQ ID NO: 291 - protein, 307 aa, Artificial Sequence
  Description of Artificial Sequence: Synthetic polypeptide
QVQLQESGGGVVQPGRSLRLSCAASRFTFNNYAMHWVRQAPGKGLEWVAVISYDGSNKYYADSVKGRFTISRDNSKNTLYLQMNSLRAEDTAVYYCARDLSGYGDYPDYWGQGTLVTVSSGGGGSGGGGSGGGGSSELTQDPAVSVALGQTVRITCQGDSLRSYYASWYQQKPGQAPVLVMYGRNERPSGVPDRFSGSKSGTSASLAISGLQPEDEANYYCAGWDDSLTGPVFGGGTKLTVLGGGGGSGGGGSGGGGSEHDCKVHCVKEWMAGHACAERQKSYTIGRAHCSGQKFDVFKCLDHCAAP

SEQ ID NO: 292 - protein, 296 aa, Artificial Sequence
  Description of Artificial Sequence: Synthetic polypeptide
REGCASRCMKYNDELEKCEARMMSMSNTEEDCEQELEDLLYCLDHCHSQGGGGSGGGGSGGGGSEPKSSDKTHTCPPCPAPEAAGGPSVFLFPPKPKDTLMISRTPEVTCVVVDVSHEDPEVKFNWYVDGVEVHNAKTKPREEQYNSTYRVVSVLTVLHQDWLNGKEYKCKVSNKALGAPIEKTISKAKGQPREPQVYTLPPSREEMTKNQVSLWCLVKGFYPSDIAVEWESNGQPENNYKTTPPVLDSDGSFFLYSKLTVDKSRWQQGNVFSCSVMHEALHNHYTQKSLSLSPGK

SEQ ID NO: 293 - protein, 435 aa, Artificial Sequence
  Description of Artificial Sequence: Synthetic polypeptide
REGCASRCMKYNDELEKCEARMMSMSNTEEDCEQELEDLLYCLDHCHSQGGGGSGGGGSGGGGSEPKSSDKTHTCPPCPAPEAAGGPSVFLFPPKPKDTLMISRTPEVTCVVVDVSHEDPEVKFNWYVDGVEVHNAKTKPREEQYNSTYRVVSVLTVLHQDWLNGKEYKCKVSNKALGAPIEKTISKAKGQPREPQVYTLPPSREEMTKNQVSLWCLVKGFYPSDIAVEWESNGQPENNYKTTPPVLDSDGSFFLYSKLTVDKSRWQQGNVFSCSVMHEALHNHYTQKSLSLSPGKGGGGSGGGGSGGGGSQVKLEESGGGSVQTGGSLRLTCAASGHTSRSYGMHWFRQAPGKEREFVSGISWRGDSTGYADSVKGRFTISRDNAKNTVDLQMNSLKPEDTAIYYCAAAAGSHWYGTHYEYDYWGQGTQVTVSS

SEQ ID NO: 294 - protein, 360 aa, Artificial Sequence
  Description of Artificial Sequence: Synthetic polypeptide
REGCASRCMKYNDELEKCEARMMSMSNTEEDCEQELEDLLYCLDHCHSQGGGGSGGGGSGGGGSEPKSSDKTHTCPPCPAPEAAGGPSVFLFPPKPKDTLMISRTPEVTCVVVDVSHEDPEVKFNWYVDGVEVHNAKTKPREEQYNSTYRVVSVLTVLHQDWLNGKEYKCKVSNKALGAPIEKTISKAKGQPREPQVYTLPPSREEMTKNQVSLWCLVKGFYPSDIAVEWESNGQPENNYKTTPPVLDSDGSFFLYSKLTVDKSRWQQGNVFSCSVMHEALHNHYTQKSLSLSPGKGGGGSGGGGSGGGGSEHDCKVHCVKEWMAGHACAERQKSYTIGRAHCSGQKFDVFKCLDHCAAP

SEQ ID NO: 295 - protein, 480 aa, Artificial Sequence
  Description of Artificial Sequence: Synthetic polypeptide
QVQLQESGGGVVQPGRSLRLSCAASRFTFNNYAMHWVRQAPGKGLEWVAVISYDGSNKYYADSVKGRFTISRDNSKNTLYLQMNSLRAEDTAVYYCARDLSGYGDYPDYWGQGTLVTVSSGGGGSGGGGSGGGGSSELTQDPAVSVALGQTVRITCQGDSLRSYYASWYQQKPGQAPVLVMYGRNERPSGVPDRFSGSKSGTSASLAISGLQPEDEANYYCAGWDDSLTGPVFGGGTKLTVLGGGGGSEPKSSDKTHTCPPCPAPEAAGGPSVFLFPPKPKDTLMISRTPEVTCVVVDVSHEDPEVKFNWYVDGVEVHNAKTKPREEQYNSTYRVVSVLTVLHQDWLNGKEYKCKVSNKALGAPIEKTISKAKGQPREPQVYTLPPSREEMTKNQVSLWCLVKGFYPSDIAVEWESNGQPENNYKTTPPVLDSDGSFFLYSKLTVDKSRWQQGNVFSCSVMHEALHNHYTQKSLSLSPGK

SEQ ID NO: 296 - protein, 619 aa, Artificial Sequence
  Description of Artificial Sequence: Synthetic polypeptide
QVQLQESGGGVVQPGRSLRLSCAASRFTFNNYAMHWVRQAPGKGLEWVAVISYDGSNKYYADSVKGRFTISRDNSKNTLYLQMNSLRAEDTAVYYCARDLSGYGDYPDYWGQGTLVTVSSGGGGSGGGGSGGGGSSELTQDPAVSVALGQTVRITCQGDSLRSYYASWYQQKPGQAPVLVMYGRNERPSGVPDRFSGSKSGTSASLAISGLQPEDEANYYCAGWDDSLTGPVFGGGTKLTVLGGGGGSEPKSSDKTHTCPPCPAPEAAGGPSVFLFPPKPKDTLMISRTPEVTCVVVDVSHEDPEVKFNWYVDGVEVHNAKTKPREEQYNSTYRVVSVLTVLHQDWLNGKEYKCKVSNKALGAPIEKTISKAKGQPREPQVYTLPPSREEMTKNQVSLWCLVKGFYPSDIAVEWESNGQPENNYKTTPPVLDSDGSFFLYSKLTVDKSRWQQGNVFSCSVMHEALHNHYTQKSLSLSPGKGGGGSGGGGSGGGGSQVKLEESGGGSVQTGGSLRLTCAASGHTSRSYGMHWFRQAPGKEREFVSGISWRGDSTGYADSVKGRFTISRDNAKNTVDLQMNSLKPEDTAIYYCAAAAGSHWYGTHYEYDYWGQGTQVTVSS

SEQ ID NO: 297 - protein, 544 aa, Artificial Sequence
  Description of Artificial Sequence: Synthetic polypeptide
QVQLQESGGGVVQPGRSLRLSCAASRFTFNNYAMHWVRQAPGKGLEWVAVISYDGSNKYYADSVKGRFTISRDNSKNTLYLQMNSLRAEDTAVYYCARDLSGYGDYPDYWGQGTLVTVSSGGGGSGGGGSGGGGSSELTQDPAVSVALGQTVRITCQGDSLRSYYASWYQQKPGQAPVLVMYGRNERPSGVPDRFSGSKSGTSASLAISGLQPEDEANYYCAGWDDSLTGPVFGGGTKLTVLGGGGGSEPKSSDKTHTCPPCPAPEAAGGPSVFLFPPKPKDTLMISRTPEVTCVVVDVSHEDPEVKFNWYVDGVEVHNAKTKPREEQYNSTYRVVSVLTVLHQDWLNGKEYKCKVSNKALGAPIEKTISKAKGQPREPQVYTLPPSREEMTKNQVSLWCLVKGFYPSDIAVEWESNGQPENNYKTTPPVLDSDGSFFLYSKLTVDKSRWQQGNVFSCSVMHEALHNHYTQKSLSLSPGKGGGGSGGGGSGGGGSEHDCKVHCVKEWMAGHACAERQKSYTIGRAHCSGQKFDVFKCLDHCAAP

SEQ ID NO: 298 - protein, 480 aa, Artificial Sequence
  Description of Artificial Sequence: Synthetic polypeptide
QVQLQESGGGVVQPGRSLRLSCAASRYPFHHHDHHWVRQAPGKGLEWVAVISYDGSNKYYADSVKGRFTISRDNSKNTLYLQMNSLRAEDTAVYYCARDLSGYGDYPDYWGQGTLVTVSSGGGGSGGGGSGGGGSSELTQDPAVSVALGQTVRITCQGDSLRSYYASWYQQKPGQAPVLVMYGRNERPSGVPDRFSGSKSGTSASLAISGLQPEDEANYYCAGWDDSLTGPVFGGGTKLTVLGGGGGSEPKSSDKTHTCPPCPAPEAAGGPSVFLFPPKPKDTLMISRTPEVTCVVVDVSHEDPEVKFNWYVDGVEVHNAKTKPREEQYNSTYRVVSVLTVLHQDWLNGKEYKCKVSNKALGAPIEKTISKAKGQPREPQVYTLPPSREEMTKNQVSLWCLVKGFYPSDIAVEWESNGQPENNYKTTPPVLDSDGSFFLYSKLTVDKSRWQQGNVFSCSVMHEALHNHYTQKSLSLSPGK

SEQ ID NO: 299 - protein, 619 aa, Artificial Sequence
  Description of Artificial Sequence: Synthetic polypeptide
QVQLQESGGGVVQPGRSLRLSCAASRYPFHHHDHHWVRQAPGKGLEWVAVISYDGSNKYYADSVKGRFTISRDNSKNTLYLQMNSLRAEDTAVYYCARDLSGYGDYPDYWGQGTLVTVSSGGGGSGGGGSGGGGSSELTQDPAVSVALGQTVRITCQGDSLRSYYASWYQQKPGQAPVLVMYGRNERPSGVPDRFSGSKSGTSASLAISGLQPEDEANYYCAGWDDSLTGPVFGGGTKLTVLGGGGGSEPKSSDKTHTCPPCPAPEAAGGPSVFLFPPKPKDTLMISRTPEVTCVVVDVSHEDPEVKFNWYVDGVEVHNAKTKPREEQYNSTYRVVSVLTVLHQDWLNGKEYKCKVSNKALGAPIEKTISKAKGQPREPQVYTLPPSREEMTKNQVSLWCLVKGFYPSDIAVEWESNGQPENNYKTTPPVLDSDGSFFLYSKLTVDKSRWQQGNVFSCSVMHEALHNHYTQKSLSLSPGKGGGGSGGGGSGGGGSQVKLEESGGGSVQTGGSLRLTCAASGHTSRSYGMGWFRQAPGKEREFVSGISWRGDSTGYADSVKGRFTISRDNAKNTVDLQMNSLKPEDTAIYYCAAAAGSAWYHTLYEYDYWGQGTQVTVSS

SEQ ID NO: 300 - protein, 544 aa, Artificial Sequence
  Description of Artificial Sequence: Synthetic polypeptide
QVQLQESGGGVVQPGRSLRLSCAASRYPFHHHDHHWVRQAPGKGLEWVAVISYDGSNKYYADSVKGRFTISRDNSKNTLYLQMNSLRAEDTAVYYCARDLSGYGDYPDYWGQGTLVTVSSGGGGSGGGGSGGGGSSELTQDPAVSVALGQTVRITCQGDSLRSYYASWYQQKPGQAPVLVMYGRNERPSGVPDRFSGSKSGTSASLAISGLQPEDEANYYCAGWDDSLTGPVFGGGTKLTVLGGGGGSEPKSSDKTHTCPPCPAPEAAGGPSVFLFPPKPKDTLMISRTPEVTCVVVDVSHEDPEVKFNWYVDGVEVHNAKTKPREEQYNSTYRVVSVLTVLHQDWLNGKEYKCKVSNKALGAPIEKTISKAKGQPREPQVYTLPPSREEMTKNQVSLWCLVKGFYPSDIAVEWESNGQPENNYKTTPPVLDSDGSFFLYSKLTVDKSRWQQGNVFSCSVMHEALHNHYTQKSLSLSPGKGGGGSGGGGSGGGGSEEDCKVHCVKEWMAGKACAERQKSYTIGRAHCSGQKFDVFKCLDHCAAP

SEQ ID NO: 301 - protein, 371 aa, Artificial Sequence
  Description of Artificial Sequence: Synthetic polypeptide
EPKSSDKTHTCPPCPAPEAAGGPSVFLFPPKPKDTLMISRTPEVTCVVVDVSHEDPEVKFNWYVDGVEVHNAKTKPREEQYNSTYRVVSVLTVLHQDWLNGKEYKCKVSNKALGAPIEKTISKAKGQPREPQVYTLPPSREEMTKNQVSLSCAVKGFYPSDIAVEWESNGQPENNYKTTPPVLDSDGSFFLVSKLTVDKSRWQQGNVFSCSVMHEALHNHYTQKSLSLSPGKGGGGSGGGGSGGGGSQVKLEESGGGSVQTGGSLRLTCAASGHTSRSYGMGWFRQAPGKEREFVSGISWRGDSTGYADSVKGRFTISRDNAKNTVDLQMNSLKPEDTAIYYCAAAAGSAWYHTLYEYDYWGQGTQVTVSS

SEQ ID NO: 302 - protein, 371 aa, Artificial Sequence
  Description of Artificial Sequence: Synthetic polypeptide
EPKSSDKTHTCPPCPAPEAAGGPSVFLFPPKPKDTLMISRTPEVTCVVVDVSHEDPEVKFNWYVDGVEVHNAKTKPREEQYNSTYRVVSVLTVLHQDWLNGKEYKCKVSNKALGAPIEKTISKAKGQPREPQVYTLPPSREEMTKNQVSLSCAVKGFYPSDIAVEWESNGQPENNYKTTPPVLDSDGSFFLVSKLTVDKSRWQQGNVFSCSVMHEALHNHYTQKSLSLSPGKGGGGSGGGGSGGGGSQVKLEESGGGSVQTGGSLRLTCAASGHTSRSYGMHWFRQAPGKEREFVSGISWRGDSTGYADSVKGRFTISRDNAKNTVDLQMNSLKPEDTAIYYCAAAAGSHWYGTHYEYDYWGQGTQVTVSS

SEQ ID NO: 303 - protein, 296 aa, Artificial Sequence
  Description of Artificial Sequence: Synthetic polypeptide
EPKSSDKTHTCPPCPAPEAAGGPSVFLFPPKPKDTLMISRTPEVTCVVVDVSHEDPEVKFNWYVDGVEVHNAKTKPREEQYNSTYRVVSVLTVLHQDWLNGKEYKCKVSNKALGAPIEKTISKAKGQPREPQVYTLPPSREEMTKNQVSLSCAVKGFYPSDIAVEWESNGQPENNYKTTPPVLDSDGSFFLVSKLTVDKSRWQQGNVFSCSVMHEALHNHYTQKSLSLSPGKGGGGSGGGGSGGGGSEEDCKVHCVKEWMAGKACAERQKSYTIGRAHCSGQKFDVFKCLDHCAAP

SEQ ID NO: 304 - protein, 296 aa, Artificial Sequence
  Description of Artificial Sequence: Synthetic polypeptide
EPKSSDKTHTCPPCPAPEAAGGPSVFLFPPKPKDTLMISRTPEVTCVVVDVSHEDPEVKFNWYVDGVEVHNAKTKPREEQYNSTYRVVSVLTVLHQDWLNGKEYKCKVSNKALGAPIEKTISKAKGQPREPQVYTLPPSREEMTKNQVSLSCAVKGFYPSDIAVEWESNGQPENNYKTTPPVLDSDGSFFLVSKLTVDKSRWQQGNVFSCSVMHEALHNHYTQKSLSLSPGKGGGGSGGGGSGGGGSEHDCKVHCVKEWMAGHACAERQKSYTIGRAHCSGQKFDVFKCLDHCAAP

SEQ ID NO: 305 - protein, 435 aa, Artificial Sequence
  Description of Artificial Sequence: Synthetic polypeptide
REGCASRCMKYNDELEKCEARMMSMSNTEEDCEQELEDLLYCLDHCHSQGGGGSGGGGSGGGGSEPKSSDKTHTCPPCPAPEAAGGPSVFLFPPKPKDTLMISRTPEVTCVVVDVSHEDPEVKFNWYVDGVEVHNAKTKPREEQYNSTYRVVSVLTVLHQDWLNGKEYKCKVSNKALGAPIEKTISKAKGQPREPQVYTLPPSREEMTKNQVSLSCAVKGFYPSDIAVEWESNGQPENNYKTTPPVLDSDGSFFLVSKLTVDKSRWQQGNVFSCSVMHEALHNHYTQKSLSLSPGKGGGGSGGGGSGGGGSQVKLEESGGGSVQTGGSLRLTCAASGHTSRSYGMHWFRQAPGKEREFVSGISWRGDSTGYADSVKGRFTISRDNAKNTVDLQMNSLKPEDTAIYYCAAAAGSHWYGTHYEYDYWGQGTQVTVSS

SEQ ID NO: 306 - protein, 360 aa, Artificial Sequence
  Description of Artificial Sequence: Synthetic polypeptide
REGCASRCMKYNDELEKCEARMMSMSNTEEDCEQELEDLLYCLDHCHSQGGGGSGGGGSGGGGSEPKSSDKTHTCPPCPAPEAAGGPSVFLFPPKPKDTLMISRTPEVTCVVVDVSHEDPEVKFNWYVDGVEVHNAKTKPREEQYNSTYRVVSVLTVLHQDWLNGKEYKCKVSNKALGAPIEKTISKAKGQPREPQVYTLPPSREEMTKNQVSLSCAVKGFYPSDIAVEWESNGQPENNYKTTPPVLDSDGSFFLVSKLTVDKSRWQQGNVFSCSVMHEALHNHYTQKSLSLSPGKGGGGSGGGGSGGGGSEHDCKVHCVKEWMAGHACAERQKSYTIGRAHCSGQKFDVFKCLDHCAAP

SEQ ID NO: 307 - protein, 435 aa, Artificial Sequence
  Description of Artificial Sequence: Synthetic polypeptide
REGCASRCMKYNDELEKCEARMMSMSNTEEDCEQELEDLLYCLDHCHSQGGGGSGGGGSGGGGSEPKSSDKTHTCPPCPAPEAAGGPSVFLFPPKPKDTLMISRTPEVTCVVVDVSHEDPEVKFNWYVDGVEVHNAKTKPREEQYNSTYRVVSVLTVLHQDWLNGKEYKCKVSNKALGAPIEKTISKAKGQPREPQVYTLPPSREEMTKNQVSLTCLVKGFYPSDIAVEWESNGQPENNYKTTPPVLDSDGSFFLYSKLTVDKSRWQQGNVFSCSVMHEALHNHYTQKSLSLSPGKGGGGSGGGGSGGGGSQVKLEESGGGSVQTGGSLRLTCAASGHTSRSYGMHWFRQAPGKEREFVSGISWRGDSTGYADSVKGRFTISRDNAKNTVDLQMNSLKPEDTAIYYCAAAAGSHWYGTHYEYDYWGQGTQVTVSS

SEQ ID NO: 308 - protein, 360 aa, Artificial Sequence
  Description of Artificial Sequence: Synthetic polypeptide
REGCASRCMKYNDELEKCEARMMSMSNTEEDCEQELEDLLYCLDHCHSQGGGGSGGGGSGGGGSEPKSSDKTHTCPPCPAPEAAGGPSVFLFPPKPKDTLMISRTPEVTCVVVDVSHEDPEVKFNWYVDGVEVHNAKTKPREEQYNSTYRVVSVLTVLHQDWLNGKEYKCKVSNKALGAPIEKTISKAKGQPREPQVYTLPPSREEMTKNQVSLTCLVKGFYPSDIAVEWESNGQPENNYKTTPPVLDSDGSFFLYSKLTVDKSRWQQGNVFSCSVMHEALHNHYTQKSLSLSPGKGGGGSGGGGSGGGGSEHDCKVHCVKEWMAGHACAERQKSYTIGRAHCSGQKFDVFKCLDHCAAP

SEQ ID NO: 309 - protein, 371 aa, Artificial Sequence
  Description of Artificial Sequence: Synthetic polypeptide
QVKLEESGGGSVQTGGSLRLTCAASGHTSRSYGMHWFRQAPGKEREFVSGISWRGDSTGYADSVKGRFTISRDNAKNTVDLQMNSLKPEDTAIYYCAAAAGSHWYGTHYEYDYWGQGTQVTVSSGGGGSGGGGSGGGGSEPKSSDKTHTCPPCPAPEAAGGPSVFLFPPKPKDTLMISRTPEVTCVVVDVSHEDPEVKFNWYVDGVEVHNAKTKPREEQYNSTYRVVSVLTVLHQDWLNGKEYKCKVSNKALGAPIEKTISKAKGQPREPQVYTLPPSREEMTKNQVSLWCLVKGFYPSDIAVEWESNGQPENNYKTTPPVLDSDGSFFLYSKLTVDKSRWQQGNVFSCSVMHEALHNHYTQKSLSLSPGK

SEQ ID NO: 310 - protein, 435 aa, Artificial Sequence
  Description of Artificial Sequence: Synthetic polypeptide
QVKLEESGGGSVQTGGSLRLTCAASGHTSRSYGMHWFRQAPGKEREFVSGISWRGDSTGYADSVKGRFTISRDNAKNTVDLQMNSLKPEDTAIYYCAAAAGSHWYGTHYEYDYWGQGTQVTVSSGGGGSGGGGSGGGGSEPKSSDKTHTCPPCPAPEAAGGPSVFLFPPKPKDTLMISRTPEVTCVVVDVSHEDPEVKFNWYVDGVEVHNAKTKPREEQYNSTYRVVSVLTVLHQDWLNGKEYKCKVSNKALGAPIEKTISKAKGQPREPQVYTLPPSREEMTKNQVSLWCLVKGFYPSDIAVEWESNGQPENNYKTTPPVLDSDGSFFLYSKLTVDKSRWQQGNVFSCSVMHEALHNHYTQKSLSLSPGKGGGGSGGGGSGGGGSREGCASRCMKYNDELEKCEARMMSMSNTEEDCEQELEDLLYCLDHCHSQ

SEQ ID NO: 311 - protein, 296 aa, Artificial Sequence
  Description of Artificial Sequence: Synthetic polypeptide
EPKSSDKTHTCPPCPAPEAAGGPSVFLFPPKPKDTLMISRTPEVTCVVVDVSHEDPEVKFNWYVDGVEVHNAKTKPREEQYNSTYRVVSVLTVLHQDWLNGKEYKCKVSNKALGAPIEKTISKAKGQPREPQVYTLPPSREEMTKNQVSLSCAVKGFYPSDIAVEWESNGQPENNYKTTPPVLDSDGSFFLVSKLTVDKSRWQQGNVFSCSVMHEALHNHYTQKSLSLSPGKGGGGSGGGGSGGGGSREGCASRCMKYNDELEKCEARMMSMSNTEEDCEQELEDLLYCLDHCHSQ

SEQ ID NO: 312 - protein, 435 aa, Artificial Sequence
  Description of Artificial Sequence: Synthetic polypeptide
QVKLEESGGGSVQTGGSLRLTCAASGHTSRSYGMHWFRQAPGKEREFVSGISWRGDSTGYADSVKGRFTISRDNAKNTVDLQMNSLKPEDTAIYYCAAAAGSHWYGTHYEYDYWGQGTQVTVSSGGGGSGGGGSGGGGSEPKSSDKTHTCPPCPAPEAAGGPSVFLFPPKPKDTLMISRTPEVTCVVVDVSHEDPEVKFNWYVDGVEVHNAKTKPREEQYNSTYRVVSVLTVLHQDWLNGKEYKCKVSNKALGAPIEKTISKAKGQPREPQVYTLPPSREEMTKNQVSLSCAVKGFYPSDIAVEWESNGQPENNYKTTPPVLDSDGSFFLVSKLTVDKSRWQQGNVFSCSVMHEALHNHYTQKSLSLSPGKGGGGSGGGGSGGGGSREGCASRCMKYNDELEKCEARMMSMSNTEEDCEQELEDLLYCLDHCHSQ

SEQ ID NO: 313 - protein, 435 aa, Artificial Sequence
  Description of Artificial Sequence: Synthetic polypeptide
QVKLEESGGGSVQTGGSLRLTCAASGHTSRSYGMHWFRQAPGKEREFVSGISWRGDSTGYADSVKGRFTISRDNAKNTVDLQMNSLKPEDTAIYYCAAAAGSHWYGTHYEYDYWGQGTQVTVSSGGGGSGGGGSGGGGSEPKSSDKTHTCPPCPAPEAAGGPSVFLFPPKPKDTLMISRTPEVTCVVVDVSHEDPEVKFNWYVDGVEVHNAKTKPREEQYNSTYRVVSVLTVLHQDWLNGKEYKCKVSNKALGAPIEKTISKAKGQPREPQVYTLPPSREEMTKNQVSLTCLVKGFYPSDIAVEWESNGQPENNYKTTPPVLDSDGSFFLYSKLTVDKSRWQQGNVFSCSVMHEALHNHYTQKSLSLSPGKGGGGSGGGGSGGGGSREGCASRCMKYNDELEKCEARMMSMSNTEEDCEQELEDLLYCLDHCHSQ

SEQ ID NO: 314 - protein, 435 aa, Artificial Sequence
  Description of Artificial Sequence: Synthetic polypeptide
QVKLEESGGGSVQTGGSLRLTCAASGHTSRSYGMHWFRQAPGKEREFVSGISWRGDSTGYADSVKGRFTISRDNAKNTVDLQMNSLKPEDTAIYYCAAAAGSHWYGTHYEYDYWGQGTQVTVSSGGGGSGGGGSGGGGSEPKSSDKTHTCPPCPAPEAAGGPSVFLFPPKPKDTLMISRTPEVTCVVVDVSHEDPEVKFNWYVDGVEVHNAKTKPREEQYNSTYRVVSVLTVLHQDWLNGKEYKCKVSNKALGAPIEKTISKAKGQPREPQVYTLPPSREEMTKNQVSLTCLVKGFYPSDIAVEWESNGQPENNYKTTPPVLDSDGSFFLYSKLTVDKSRWQQGNVFSCSVMHEALHNHYTQKSLSLSPGKGGGGSGGGGSGGGGSREGCASHCTKYKAELEKCEARVSSRSNTEETCVQELFDFLHCVDHCVSQ

SEQ ID NO: 315 - protein, 303 aa, Artificial Sequence
  Description of Artificial Sequence: Synthetic polypeptide
REGCASRCMKYNDELEKCEARMMSMSNTEEDCEQELEDLLYCLDHCHSQGTGGGGSGGGGSGGGGSGGGGSEPKSCDKTHTCPPCPAPEAAGGPSVFLFPPKPKDTLMISRTPEVTCVVVDVSHEDPEVKFNWYVDGVEVHNAKTKPREEQYNSTYRVVSVLTVLHQDWLNGKEYKCKVSNKALGAPIEKTISKAKGQPREPQVYTLPPSRDELTKNQVSLWCLVKGFYPSDIAVEWESNGQPENNYKTTPPVLDSDGSFFLYSKLTVDKSRWQQGNVFSCSVMHEALHNHYTQKSLSLSPGK

SEQ ID NO: 316 - protein, 307 aa, Artificial Sequence
  Description of Artificial Sequence: Synthetic polypeptide
REGCASRCMKYNDELEKCEARMMSMSNTEEDCEQELEDLLYCLDHCHSQGTGSPVPSTPPTPSPSTPPTPSPSASEPKSCDKTHTCPPCPAPEAAGGPSVFLFPPKPKDTLMISRTPEVTCVVVDVSHEDPEVKFNWYVDGVEVHNAKTKPREEQYNSTYRVVSVLTVLHQDWLNGKEYKCKVSNKALGAPIEKTISKAKGQPREPQVYTLPPSRDELTKNQVSLWCLVKGFYPSDIAVEWESNGQPENNYKTTPPVLDSDGSFFLYSKLTVDKSRWQQGNVFSCSVMHEALHNHYTQKSLSLSPGK

SEQ ID NO: 317 - protein, 185 aa, Artificial Sequence
  Description of Artificial Sequence: Synthetic polypeptide
EHDCKVHCVKEWMAGHACAERQKSYTIGRAHCSGQKFDVFKCLDHCAAPGTGGGGSGGGGSGGGGSGGGGSLKEAKEKAIEELKKAGITSDYYFDLINKAKTVEGVNALKDEILKAGGGGSGGGGSGGGGSGGGGSREGCASRCMKYNDELEKCEARMMSMSNTEEDCEQELEDLLYCLDHCHSQ

SEQ ID NO: 318 - protein, 185 aa, Artificial Sequence
  Description of Artificial Sequence: Synthetic polypeptide
EHDCKVHCVKEWMAGHACAERQKSYTIGRAHCSGQKFDVFKCLDHCAAPGTGGGGSGGGGSGGGGSGGGGSLKEAKEKAIEELKKAGITSDYYFDLINKAKAVEGVNALKDEILKAGGGGSGGGGSGGGGSGGGGSREGCASRCMKYNDELEKCEARMMSMSNTEEDCEQELEDLLYCLDHCHSQ

SEQ ID NO: 319 - protein, 303 aa, Artificial Sequence
  Description of Artificial Sequence: Synthetic polypeptide
EHDCKVHCVKEWMAGHACAERQKSYTIGRAHCSGQKFDVFKCLDHCAAPGTGGGGSGGGGSGGGGSGGGGSEPKSCDKTHTCPPCPAPEAAGGPSVFLFPPKPKDTLMISRTPEVTCVVVDVSHEDPEVKFNWYVDGVEVHNAKTKPREEQYNSTYRVVSVLTVLHQDWLNGKEYKCKVSNKALGAPIEKTISKAKGQPREPQVYTLPPSRDELTKNQVSLSCAVKGFYPSDIAVEWESNGQPENNYKTTPPVLDSDGSFFLVSKLTVDKSRWQQGNVFSCSVMHEALHNHYTQKSLSLSPGK

SEQ ID NO: 320 - protein, 367 aa, Artificial Sequence
  Description of Artificial Sequence: Synthetic polypeptide
EHDCKVHCVKEWMAGHACAERQKSYTIGRAHCSGQKFDVFKCLDHCAAPGTGGGGSGGGGSGGGGSGGGGSEPKSCDKTHTCPPCPAPEAAGGPSVFLFPPKPKDTLMISRTPEVTCVVVDVSHEDPEVKFNWYVDGVEVHNAKTKPREEQYNSTYRVVSVLTVLHQDWLNGKEYKCKVSNKALGAPIEKTISKAKGQPREPQVYTLPPSRDELTKNQVSLSCAVKGFYPSDIAVEWESNGQPENNYKTTPPVLDSDGSFFLVSKLTVDKSRWQQGNVFSCSVMHEALHNHYTQKSLSLSPGKGGGGSGGGGSGGGGSREGCASRCMKYNDELEKCEARMMSMSNTEEDCEQELEDLLYCLDHCHSQ

SEQ ID NO: 321 - protein, 303 aa, Artificial Sequence
  Description of Artificial Sequence: Synthetic polypeptide
EHDCKVHCVKEWMAGHACAERQKSYTIGRAHCSGQKFDVFKCLDHCAAPGTGGGGSGGGGSGGGGSGGGGSEPKSCDKTHTCPPCPAPEAAGGPSVFLFPPKPKDTLMISRTPEVTCVVVDVSHEDPEVKFNWYVDGVEVHNAKTKPREEQYNSTYRVVSVLTVLHQDWLNGKEYKCKVSNKALGAPIEKTISKAKGQPREPQVYTLPPSRDELTKNQVSLWCLVKGFYPSDIAVEWESNGQPENNYKTTPPVLDSDGSFFLYSKLTVDKSRWQQGNVFSCSVMHEALHNHYTQKSLSLSPGK

SEQ ID NO: 322 - protein, 193 aa, Artificial Sequence
  Description of Artificial Sequence: Synthetic polypeptide
EHDCKVHCVKEWMAGHACAERQKSYTIGRAHCSGQKFDVFKCLDHCAAPGTGSPVPSTPPTPSPSTPPTPSPSASLKEAKEKAIEELKKAGITSDYYFDLINKAKTVEGVNALKDEILKAGSPVPSTPPTPSPSTPPTPSPSASREGCASRCMKYNDELEKCEARMMSMSNTEEDCEQELEDLLYCLDHCHSQ

SEQ ID NO: 323 - protein, 193 aa, Artificial Sequence
  Description of Artificial Sequence: Synthetic polypeptide
EHDCKVHCVKEWMAGHACAERQKSYTIGRAHCSGQKFDVFKCLDHCAAPGTGSPVPSTPPTPSPSTPPTPSPSASLKEAKEKAIEELKKAGITSDYYFDLINKAKAVEGVNALKDEILKAGSPVPSTPPTPSPSTPPTPSPSASREGCASRCMKYNDELEKCEARMMSMSNTEEDCEQELEDLLYCLDHCHSQ

SEQ ID NO: 324 - protein, 307 aa, Artificial Sequence
  Description of Artificial Sequence: Synthetic polypeptide
EHDCKVHCVKEWMAGHACAERQKSYTIGRAHCSGQKFDVFKCLDHCAAPGTGSPVPSTPPTPSPSTPPTPSPSASEPKSCDKTHTCPPCPAPEAAGGPSVFLFPPKPKDTLMISRTPEVTCVVVDVSHEDPEVKFNWYVDGVEVHNAKTKPREEQYNSTYRVVSVLTVLHQDWLNGKEYKCKVSNKALGAPIEKTISKAKGQPREPQVYTLPPSRDELTKNQVSLSCAVKGFYPSDIAVEWESNGQPENNYKTTPPVLDSDGSFFLVSKLTVDKSRWQQGNVFSCSVMHEALHNHYTQKSLSLSPGK

SEQ ID NO: 325 - protein, 371 aa, Artificial Sequence
  Description of Artificial Sequence: Synthetic polypeptide
EHDCKVHCVKEWMAGHACAERQKSYTIGRAHCSGQKFDVFKCLDHCAAPGTGSPVPSTPPTPSPSTPPTPSPSASEPKSCDKTHTCPPCPAPEAAGGPSVFLFPPKPKDTLMISRTPEVTCVVVDVSHEDPEVKFNWYVDGVEVHNAKTKPREEQYNSTYRVVSVLTVLHQDWLNGKEYKCKVSNKALGAPIEKTISKAKGQPREPQVYTLPPSRDELTKNQVSLSCAVKGFYPSDIAVEWESNGQPENNYKTTPPVLDSDGSFFLVSKLTVDKSRWQQGNVFSCSVMHEALHNHYTQKSLSLSPGKGGGGSGGGGSGGGGSREGCASRCMKYNDELEKCEARMMSMSNTEEDCEQELEDLLYCLDHCHSQ

SEQ ID NO: 326 - protein, 307 aa, Artificial Sequence
  Description of Artificial Sequence: Synthetic polypeptide
EHDCKVHCVKEWMAGHACAERQKSYTIGRAHCSGQKFDVFKCLDHCAAPGTGSPVPSTPPTPSPSTPPTPSPSASEPKSCDKTHTCPPCPAPEAAGGPSVFLFPPKPKDTLMISRTPEVTCVVVDVSHEDPEVKFNWYVDGVEVHNAKTKPREEQYNSTYRVVSVLTVLHQDWLNGKEYKCKVSNKALGAPIEKTISKAKGQPREPQVYTLPPSRDELTKNQVSLWCLVKGFYPSDIAVEWESNGQPENNYKTTPPVLDSDGSFFLYSKLTVDKSRWQQGNVFSCSVMHEALHNHYTQKSLSLSPGK

SEQ ID NO: 327 - protein, 189 aa, Artificial Sequence
  Description of Artificial Sequence: Synthetic polypeptide
NSDSECPLSHDGYCLHGGVCMYIKAVDRYACNCVVGYIGERCQYRDLTWWGPRGTGGGGSGGGGSGGGGSGGGGSLKEAKEKAIEELKKAGITSDYYFDLINKAKTVEGVNALKDEILKAGGGGSGGGGSGGGGSGGGGSREGCASRCMKYNDELEKCEARMMSMSNTEEDCEQELEDLLYCLDHCHSQ

SEQ ID NO: 328 - protein, 189 aa, Artificial Sequence
  Description of Artificial Sequence: Synthetic polypeptide
NSDSECPLSHDGYCLHGGVCMYIKAVDRYACNCVVGYIGERCQYRDLTWWGPRGTGGGGSGGGGSGGGGSGGGGSLKEAKEKAIEELKKAGITSDYYFDLINKAKAVEGVNALKDEILKAGGGGSGGGGSGGGGSGGGGSREGCASRCMKYNDELEKCEARMMSMSNTEEDCEQELEDLLYCLDHCHSQ

SEQ ID NO: 329 - protein, 307 aa, Artificial Sequence
  Description of Artificial Sequence: Synthetic polypeptide
NSDSECPLSHDGYCLHGGVCMYIKAVDRYACNCVVGYIGERCQYRDLTWWGPRGTGGGGSGGGGSGGGGSGGGGSEPKSCDKTHTCPPCPAPEAAGGPSVFLFPPKPKDTLMISRTPEVTCVVVDVSHEDPEVKFNWYVDGVEVHNAKTKPREEQYNSTYRVVSVLTVLHQDWLNGKEYKCKVSNKALGAPIEKTISKAKGQPREPQVYTLPPSRDELTKNQVSLSCAVKGFYPSDIAVEWESNGQPENNYKTTPPVLDSDGSFFLVSKLTVDKSRWQQGNVFSCSVMHEALHNHYTQKSLSLSPGK

SEQ ID NO: 330 - protein, 371 aa, Artificial Sequence
  Description of Artificial Sequence: Synthetic polypeptide
NSDSECPLSHDGYCLHGGVCMYIKAVDRYACNCVVGYIGERCQYRDLTWWGPRGTGGGGSGGGGSGGGGSGGGGSEPKSCDKTHTCPPCPAPEAAGGPSVFLFPPKPKDTLMISRTPEVTCVVVDVSHEDPEVKFNWYVDGVEVHNAKTKPREEQYNSTYRVVSVLTVLHQDWLNGKEYKCKVSNKALGAPIEKTISKAKGQPREPQVYTLPPSRDELTKNQVSLSCAVKGFYPSDIAVEWESNGQPENNYKTTPPVLDSDGSFFLVSKLTVDKSRWQQGNVFSCSVMHEALHNHYTQKSLSLSPGKGGGGSGGGGSGGGGSREGCASRCMKYNDELEKCEARMMSMSNTEEDCEQELEDLLYCLDHCHSQ

SEQ ID NO: 331 - protein, 307 aa, Artificial Sequence
  Description of Artificial Sequence: Synthetic polypeptide
NSDSECPLSHDGYCLHGGVCMYIKAVDRYACNCVVGYIGERCQYRDLTWWGPRGTGGGGSGGGGSGGGGSGGGGSEPKSCDKTHTCPPCPAPEAAGGPSVFLFPPKPKDTLMISRTPEVTCVVVDVSHEDPEVKFNWYVDGVEVHNAKTKPREEQYNSTYRVVSVLTVLHQDWLNGKEYKCKVSNKALGAPIEKTISKAKGQPREPQVYTLPPSRDELTKNQVSLWCLVKGFYPSDIAVEWESNGQPENNYKTTPPVLDSDGSFFLYSKLTVDKSRWQQGNVFSCSVMHEALHNHYTQKSLSLSPGK

SEQ ID NO: 332 - protein, 197 aa, Artificial Sequence
  Description of Artificial Sequence: Synthetic polypeptide
NSDSECPLSHDGYCLHGGVCMYIKAVDRYACNCVVGYIGERCQYRDLTWWGPRGTGSPVPSTPPTPSPSTPPTPSPSASLKEAKEKAIEELKKAGITSDYYFDLINKAKTVEGVNALKDEILKAGSPVPSTPPTPSPSTPPTPSPSASREGCASRCMKYNDELEKCEARMMSMSNTEEDCEQELEDLLYCLDHCHSQ

SEQ ID NO: 333 - protein, 197 aa, Artificial Sequence
  Description of Artificial Sequence: Synthetic polypeptide
NSDSECPLSHDGYCLHGGVCMYIKAVDRYACNCVVGYIGERCQYRDLTWWGPRGTGSPVPSTPPTPSPSTPPTPSPSASLKEAKEKAIEELKKAGITSDYYFDLINKAKAVEGVNALKDEILKAGSPVPSTPPTPSPSTPPTPSPSASREGCASRCMKYNDELEKCEARMMSMSNTEEDCEQELEDLLYCLDHCHSQ

SEQ ID NO: 334 - protein, 311 aa, Artificial Sequence
  Description of Artificial Sequence: Synthetic polypeptide
NSDSECPLSHDGYCLHGGVCMYIKAVDRYACNCVVGYIGERCQYRDLTWWGPRGTGSPVPSTPPTPSPSTPPTPSPSASEPKSCDKTHTCPPCPAPEAAGGPSVFLFPPKPKDTLMISRTPEVTCVVVDVSHEDPEVKFNWYVDGVEVHNAKTKPREEQYNSTYRVVSVLTVLHQDWLNGKEYKCKVSNKALGAPIEKTISKAKGQPREPQVYTLPPSRDELTKNQVSLSCAVKGFYPSDIAVEWESNGQPENNYKTTPPVLDSDGSFFLVSKLTVDKSRWQQGNVFSCSVMHEALHNHYTQKSLSLSPGK

SEQ ID NO: 335 - protein, 375 aa, Artificial Sequence
  Description of Artificial Sequence: Synthetic polypeptide
NSDSECPLSHDGYCLHGGVCMYIKAVDRYACNCVVGYIGERCQYRDLTWWGPRGTGSPVPSTPPTPSPSTPPTPSPSASEPKSCDKTHTCPPCPAPEAAGGPSVFLFPPKPKDTLMISRTPEVTCVVVDVSHEDPEVKFNWYVDGVEVHNAKTKPREEQYNSTYRVVSVLTVLHQDWLNGKEYKCKVSNKALGAPIEKTISKAKGQPREPQVYTLPPSRDELTKNQVSLSCAVKGFYPSDIAVEWESNGQPENNYKTTPPVLDSDGSFFLVSKLTVDKSRWQQGNVFSCSVMHEALHNHYTQKSLSLSPGKGGGGSGGGGSGGGGSREGCASRCMKYNDELEKCEARMMSMSNTEEDCEQELEDLLYCLDHCHSQ

SEQ ID NO: 336 - protein, 311 aa, Artificial Sequence
  Description of Artificial Sequence: Synthetic polypeptide
NSDSECPLSHDGYCLHGGVCMYIKAVDRYACNCVVGYIGERCQYRDLTWWGPRGTGSPVPSTPPTPSPSTPPTPSPSASEPKSCDKTHTCPPCPAPEAAGGPSVFLFPPKPKDTLMISRTPEVTCVVVDVSHEDPEVKFNWYVDGVEVHNAKTKPREEQYNSTYRVVSVLTVLHQDWLNGKEYKCKVSNKALGAPIEKTISKAKGQPREPQVYTLPPSRDELTKNQVSLWCLVKGFYPSDIAVEWESNGQPENNYKTTPPVLDSDGSFFLYSKLTVDKSRWQQGNVFSCSVMHEALHNHYTQKSLSLSPGK

SEQ ID NO: 337 - protein, 260 aa, Artificial Sequence
  Description of Artificial Sequence: Synthetic polypeptide
QVKLEESGGGSVQTGGSLRLTCAASGHTSRSYGMHWFRQAPGKEREFVSGISWRGDSTGYADSVKGRFTISRDNAKNTVDLQMNSLKPEDTAIYYCAAAAGSHWYGTHYEYDYWGQGTQVTVSSGTGGGGSGGGGSGGGGSGGGGSLKEAKEKAIEELKKAGITSDYYFDLINKAKTVEGVNALKDEILKAGGGGSGGGGSGGGGSGGGGSREGCASRCMKYNDELEKCEARMMSMSNTEEDCEQELEDLLYCLDHCHSQ

SEQ ID NO: 338 - protein, 260 aa, Artificial Sequence
  Description of Artificial Sequence: Synthetic polypeptide
QVKLEESGGGSVQTGGSLRLTCAASGHTSRSYGMHWFRQAPGKEREFVSGISWRGDSTGYADSVKGRFTISRDNAKNTVDLQMNSLKPEDTAIYYCAAAAGSHWYGTHYEYDYWGQGTQVTVSSGTGGGGSGGGGSGGGGSGGGGSLKEAKEKAIEELKKAGITSDYYFDLINKAKAVEGVNALKDEILKAGGGGSGGGGSGGGGSGGGGSREGCASRCMKYNDELEKCEARMMSMSNTEEDCEQELEDLLYCLDHCHSQ

SEQ ID NO: 339 - protein, 378 aa, Artificial Sequence
  Description of Artificial Sequence: Synthetic polypeptide
QVKLEESGGGSVQTGGSLRLTCAASGHTSRSYGMHWFRQAPGKEREFVSGISWRGDSTGYADSVKGRFTISRDNAKNTVDLQMNSLKPEDTAIYYCAAAAGSHWYGTHYEYDYWGQGTQVTVSSGTGGGGSGGGGSGGGGSGGGGSEPKSCDKTHTCPPCPAPEAAGGPSVFLFPPKPKDTLMISRTPEVTCVVVDVSHEDPEVKFNWYVDGVEVHNAKTKPREEQYNSTYRVVSVLTVLHQDWLNGKEYKCKVSNKALGAPIEKTISKAKGQPREPQVYTLPPSRDELTKNQVSLSCAVKGFYPSDIAVEWESNGQPENNYKTTPPVLDSDGSFFLVSKLTVDKSRWQQGNVFSCSVMHEALHNHYTQKSLSLSPGK

SEQ ID NO: 340 - protein, 442 aa, Artificial Sequence
  Description of Artificial Sequence: Synthetic polypeptide
QVKLEESGGGSVQTGGSLRLTCAASGHTSRSYGMHWFRQAPGKEREFVSGISWRGDSTGYADSVKGRFTISRDNAKNTVDLQMNSLKPEDTAIYYCAAAAGSHWYGTHYEYDYWGQGTQVTVSSGTGGGGSGGGGSGGGGSGGGGSEPKSCDKTHTCPPCPAPEAAGGPSVFLFPPKPKDTLMISRTPEVTCVVVDVSHEDPEVKFNWYVDGVEVHNAKTKPREEQYNSTYRVVSVLTVLHQDWLNGKEYKCKVSNKALGAPIEKTISKAKGQPREPQVYTLPPSRDELTKNQVSLSCAVKGFYPSDIAVEWESNGQPENNYKTTPPVLDSDGSFFLVSKLTVDKSRWQQGNVFSCSVMHEALHNHYTQKSLSLSPGKGGGGSGGGGSGGGGSREGCASRCMKYNDELEKCEARMMSMSNTEEDCEQELEDLLYCLDHCHSQ

SEQ ID NO: 341 - protein, 378 aa, Artificial Sequence
  Description of Artificial Sequence: Synthetic polypeptide
QVKLEESGGGSVQTGGSLRLTCAASGHTSRSYGMHWFRQAPGKEREFVSGISWRGDSTGYADSVKGRFTISRDNAKNTVDLQMNSLKPEDTAIYYCAAAAGSHWYGTHYEYDYWGQGTQVTVSSGTGGGGSGGGGSGGGGSGGGGSEPKSCDKTHTCPPCPAPEAAGGPSVFLFPPKPKDTLMISRTPEVTCVVVDVSHEDPEVKFNWYVDGVEVHNAKTKPREEQYNSTYRVVSVLTVLHQDWLNGKEYKCKVSNKALGAPIEKTISKAKGQPREPQVYTLPPSRDELTKNQVSLWCLVKGFYPSDIAVEWESNGQPENNYKTTPPVLDSDGSFFLYSKLTVDKSRWQQGNVFSCSVMHEALHNHYTQKSLSLSPGK

SEQ ID NO: 342 - protein, 268 aa, Artificial Sequence
  Description of Artificial Sequence: Synthetic polypeptide
QVKLEESGGGSVQTGGSLRLTCAASGHTSRSYGMHWFRQAPGKEREFVSGISWRGDSTGYADSVKGRFTISRDNAKNTVDLQMNSLKPEDTAIYYCAAAAGSHWYGTHYEYDYWGQGTQVTVSSGTGSPVPSTPPTPSPSTPPTPSPSASLKEAKEKAIEELKKAGITSDYYFDLINKAKTVEGVNALKDEILKAGSPVPSTPPTPSPSTPPTPSPSASREGCASRCMKYNDELEKCEARMMSMSNTEEDCEQELEDLLYCLDHCHSQ

SEQ ID NO: 343 - protein, 268 aa, Artificial Sequence
  Description of Artificial Sequence: Synthetic polypeptide
QVKLEESGGGSVQTGGSLRLTCAASGHTSRSYGMHWFRQAPGKEREFVSGISWRGDSTGYADSVKGRFTISRDNAKNTVDLQMNSLKPEDTAIYYCAAAAGSHWYGTHYEYDYWGQGTQVTVSSGTGSPVPSTPPTPSPSTPPTPSPSASLKEAKEKAIEELKKAGITSDYYFDLINKAKAVEGVNALKDEILKAGSPVPSTPPTPSPSTPPTPSPSASREGCASRCMKYNDELEKCEARMMSMSNTEEDCEQELEDLLYCLDHCHSQ

SEQ ID NO: 344 - protein, 382 aa, Artificial Sequence
  Description of Artificial Sequence: Synthetic polypeptide
QVKLEESGGGSVQTGGSLRLTCAASGHTSRSYGMHWFRQAPGKEREFVSGISWRGDSTGYADSVKGRFTISRDNAKNTVDLQMNSLKPEDTAIYYCAAAAGSHWYGTHYEYDYWGQGTQVTVSSGTGSPVPSTPPTPSPSTPPTPSPSASEPKSCDKTHTCPPCPAPEAAGGPSVFLFPPKPKDTLMISRTPEVTCVVVDVSHEDPEVKFNWYVDGVEVHNAKTKPREEQYNSTYRVVSVLTVLHQDWLNGKEYKCKVSNKALGAPIEKTISKAKGQPREPQVYTLPPSRDELTKNQVSLSCAVKGFYPSDIAVEWESNGQPENNYKTTPPVLDSDGSFFLVSKLTVDKSRWQQGNVFSCSVMHEALHNHYTQKSLSLSPGK

SEQ ID NO: 345 - protein, 446 aa, Artificial Sequence
  Description of Artificial Sequence: Synthetic polypeptide
QVKLEESGGGSVQTGGSLRLTCAASGHTSRSYGMHWFRQAPGKEREFVSGISWRGDSTGYADSVKGRFTISRDNAKNTVDLQMNSLKPEDTAIYYCAAAAGSHWYGTHYEYDYWGQGTQVTVSSGTGSPVPSTPPTPSPSTPPTPSPSASEPKSCDKTHTCPPCPAPEAAGGPSVFLFPPKPKDTLMISRTPEVTCVVVDVSHEDPEVKFNWYVDGVEVHNAKTKPREEQYNSTYRVVSVLTVLHQDWLNGKEYKCKVSNKALGAPIEKTISKAKGQPREPQVYTLPPSRDELTKNQVSLSCAVKGFYPSDIAVEWESNGQPENNYKTTPPVLDSDGSFFLVSKLTVDKSRWQQGNVFSCSVMHEALHNHYTQKSLSLSPGKGGGGSGGGGSGGGGSREGCASRCMKYNDELEKCEARMMSMSNTEEDCEQELEDLLYCLDHCHSQ

SEQ ID NO: 346 - protein, 382 aa, Artificial Sequence
  Description of Artificial Sequence: Synthetic polypeptide
QVKLEESGGGSVQTGGSLRLTCAASGHTSRSYGMHWFRQAPGKEREFVSGISWRGDSTGYADSVKGRFTISRDNAKNTVDLQMNSLKPEDTAIYYCAAAAGSHWYGTHYEYDYWGQGTQVTVSSGTGSPVPSTPPTPSPSTPPTPSPSASEPKSCDKTHTCPPCPAPEAAGGPSVFLFPPKPKDTLMISRTPEVTCVVVDVSHEDPEVKFNWYVDGVEVHNAKTKPREEQYNSTYRVVSVLTVLHQDWLNGKEYKCKVSNKALGAPIEKTISKAKGQPREPQVYTLPPSRDELTKNQVSLWCLVKGFYPSDIAVEWESNGQPENNYKTTPPVLDSDGSFFLYSKLTVDKSRWQQGNVFSCSVMHEALHNHYTQKSLSLSPGK

SEQ ID NO: 347 - protein, 382 aa, Artificial Sequence
  Description of Artificial Sequence: Synthetic polypeptide
QVQLQESGGGVVQPGRSLRLSCAASRYPFHHHDHHWVRQAPGKGLEWVAVISYDGSNKYYADSVKGRFTISRDNSKNTLYLQMNSLRAEDTAVYYCARDLSGYGDYPDYWGQGTLVTVSSGGGGSGGGGSGGGGSSELTQDPAVSVALGQTVRITCQGDSLRSYYASWYQQKPGQAPVLVMYGRNERPSGVPDRFSGSKSGTSASLAISGLQPEDEANYYCAGWDDSLTGPVFGGGTKLTVLGGGGGSGGGGSGGGGSQVKLEESGGGSVQTGGSLRLTCAASGHTSRSYGMGWFRQAPGKEREFVSGISWRGDSTGYADSVKGRFTISRDNAKNTVDLQMNSLKPEDTAIYYCAAAAGSAWYHTLYEYDYWGQGTQVTVSS

SEQ ID NO: 348 - protein, 307 aa, Artificial Sequence
  Description of Artificial Sequence: Synthetic polypeptide
QVQLQESGGGVVQPGRSLRLSCAASRYPFHHHDHHWVRQAPGKGLEWVAVISYDGSNKYYADSVKGRFTISRDNSKNTLYLQMNSLRAEDTAVYYCARDLSGYGDYPDYWGQGTLVTVSSGGGGSGGGGSGGGGSSELTQDPAVSVALGQTVRITCQGDSLRSYYASWYQQKPGQAPVLVMYGRNERPSGVPDRFSGSKSGTSASLAISGLQPEDEANYYCAGWDDSLTGPVFGGGTKLTVLGGGGGSGGGGSGGGGSEEDCKVHCVKEWMAGKACAERQKSYTIGRAHCSGQKFDVFKCLDHCAAP

SEQ ID NO: 349 - protein, 188 aa, Artificial Sequence
  Description of Artificial Sequence: Synthetic polypeptide
REGCASRCMKYNDELEKCEARMMSMSNTEEDCEQELEDLLYCLDHCHSQGGGGSGGGGSGGGGSQVKLEESGGGSVQTGGSLRLTCAASGHTSRSYGMGWFRQAPGKEREFVSGISWRGDSTGYADSVKGRFTISRDNAKNTVDLQMNSLKPEDTAIYYCAAAAGSAWYHTLYEYDYWGQGTQVTVSS

SEQ ID NO: 350 - protein, 382 aa, Artificial Sequence
  Description of Artificial Sequence: Synthetic polypeptide
QVQLQESGGGVVQPGRSLRLSCAASRFTFNNYAMHWVRQAPGKGLEWVAVISYDGSNKYYADSVKGRFTISRDNSKNTLYLQMNSLRAEDTAVYYCARDLSGYGDYPDYWGQGTLVTVSSGGGGSGGGGSGGGGSSELTQDPAVSVALGQTVRITCQGDSLRSYYASWYQQKPGQAPVLVMYGRNERPSGVPDRFSGSKSGTSASLAISGLQPEDEANYYCAGWDDSLTGPVFGGGTKLTVLGGGGGSGGGGSGGGGSQVKLEESGGGSVQTGGSLRLTCAASGHTSRSYGMGWFRQAPGKEREFVSGISWRGDSTGYADSVKGRFTISRDNAKNTVDLQMNSLKPEDTAIYYCAAAAGSAWYHTLYEYDYWGQGTQVTVSS

SEQ ID NO: 351 - protein, 113 aa, Artificial Sequence
  Description of Artificial Sequence: Synthetic polypeptide
REGCASRCMKYNDELEKCEARMMSMSNTEEDCEQELEDLLYCLDHCHSQGGGGSGGGGSGGGGSEEDCKVHCVKEWMAGKACAERQKSYTIGRAHCSGQKFDVFKCLDHCAAP

SEQ ID NO: 352 - protein, 307 aa, Artificial Sequence
  Description of Artificial Sequence: Synthetic polypeptide
QVQLQESGGGVVQPGRSLRLSCAASRFTFNNYAMHWVRQAPGKGLEWVAVISYDGSNKYYADSVKGRFTISRDNSKNTLYLQMNSLRAEDTAVYYCARDLSGYGDYPDYWGQGTLVTVSSGGGGSGGGGSGGGGSSELTQDPAVSVALGQTVRITCQGDSLRSYYASWYQQKPGQAPVLVMYGRNERPSGVPDRFSGSKSGTSASLAISGLQPEDEANYYCAGWDDSLTGPVFGGGTKLTVLGGGGGSGGGGSGGGGSEEDCKVHCVKEWMAGKACAERQKSYTIGRAHCSGQKFDVFKCLDHCAAP

SEQ ID NO: 353 - protein, 435 aa, Artificial Sequence
  Description of Artificial Sequence: Synthetic polypeptide
QVKLEESGGGSVQTGGSLRLTCAASGHTSRSYGMGWFRQAPGKEREFVSGISWRGDSTGYADSVKGRFTISRDNAKNTVDLQMNSLKPEDTAIYYCAAAAGSAWYHTLYEYDYWGQGTQVTVSSGGGGSGGGGSGGGGSEPKSSDKTHTCPPCPAPEAAGGPSVFLFPPKPKDTLMISRTPEVTCVVVDVSHEDPEVKFNWYVDGVEVHNAKTKPREEQYNSTYRVVSVLTVLHQDWLNGKEYKCKVSNKALGAPIEKTISKAKGQPREPQVYTLPPSREEMTKNQVSLTCLVKGFYPSDIAVEWESNGQPENNYKTTPPVLDSDGSFFLYSKLTVDKSRWQQGNVFSCSVMHEALHNHYTQKSLSLSPGKGGGGSGGGGSGGGGSREGCASRCMKYNDELEKCEARMMSMSNTEEDCEQELEDLLYCLDHCHSQ

SEQ ID NO: 354 - protein, 426 aa, Artificial Sequence
  Description of Artificial Sequence: Synthetic polypeptide
QVQLVESGGALVQPGGSLRLSCAASGFPVNRYSMRWYRQAPGKEREWVAGMSSAGDRSSYEDSVKGRFTISRDDARNTVYLQMNSLKPEDTAVYYCNVNVGFEYWGQGTQVTVSSGGGGSGGGGSGGGGSEPKSSDKTHTCPPCPAPEAAGGPSVFLFPPKPKDTLMISRTPEVTCVVVDVSHEDPEVKFNWYVDGVEVHNAKTKPREEQYNSTYRVVSVLTVLHQDWLNGKEYKCKVSNKALGAPIEKTISKAKGQPREPQVYTLPPSREEMTKNQVSLTCLVKGFYPSDIAVEWESNGQPENNYKTTPPVLDSDGSFFLYSKLTVDKSRWQQGNVFSCSVMHEALHNHYTQKSLSLSPGKGGGGSGGGGSGGGGSREGCASRCMKYNDELEKCEARMMSMSNTEEDCEQELEDLLYCLDHCHSQ

SEQ ID NO: 355 - protein, 185 aa, Artificial Sequence
  Description of Artificial Sequence: Synthetic polypeptide
EEDCKVHCVKEWMAGKACAERQKSYTIGRAHCSGQKFDVFKCLDHCAAPGTGGGGSGGGGSGGGGSGGGGSLKEAKEKAIEELKKAGITSDYYFDLINKAKTVEGVNALKDEILKAGGGGSGGGGSGGGGSGGGGSREGCASRCMKYNDELEKCEARMMSMSNTEEDCEQELEDLLYCLDHCHSQ

SEQ ID NO: 356 - protein, 185 aa, Artificial Sequence
  Description of Artificial Sequence: Synthetic polypeptide
EEDCKVHCVKEWMAGKACAERQKSYTIGRAHCSGQKFDVFKCLDHCAAPGTGGGGSGGGGSGGGGSGGGGSLKEAKEKAIEELKKAGITSDYYFDLINKAKAVEGVNALKDEILKAGGGGSGGGGSGGGGSGGGGSREGCASRCMKYNDELEKCEARMMSMSNTEEDCEQELEDLLYCLDHCHSQ

SEQ ID NO: 357 - protein, 185 aa, Artificial Sequence
  Description of Artificial Sequence: Synthetic polypeptide
EEDCKVHCVKEWMAGKACAERQKSYTIGRAHCSGQKFDVFKCLDHCAAPGTGGGGSGGGGSGGGGSGGGGSLKEAKEKAIEELKKAGITSDYYFDLINKAKAVEGVNALKDEILKAGGGGSGGGGSGGGGSGGGGSREGCASHCTKYKAELEKCEARVSSRSNTEETCVQELFDFLHCVDHCVSQ

SEQ ID NO: 358 - protein, 303 aa, Artificial Sequence
  Description of Artificial Sequence: Synthetic polypeptide
EEDCKVHCVKEWMAGKACAERQKSYTIGRAHCSGQKFDVFKCLDHCAAPGTGGGGSGGGGSGGGGSGGGGSEPKSCDKTHTCPPCPAPEAAGGPSVFLFPPKPKDTLMISRTPEVTCVVVDVSHEDPEVKFNWYVDGVEVHNAKTKPREEQYNSTYRVVSVLTVLHQDWLNGKEYKCKVSNKALGAPIEKTISKAKGQPREPQVYTLPPSRDELTKNQVSLSCAVKGFYPSDIAVEWESNGQPENNYKTTPPVLDSDGSFFLVSKLTVDKSRWQQGNVFSCSVMHEALHNHYTQKSLSLSPGK

SEQ ID NO: 359 - protein, 367 aa, Artificial Sequence
  Description of Artificial Sequence: Synthetic polypeptide
EEDCKVHCVKEWMAGKACAERQKSYTIGRAHCSGQKFDVFKCLDHCAAPGTGGGGSGGGGSGGGGSGGGGSEPKSCDKTHTCPPCPAPEAAGGPSVFLFPPKPKDTLMISRTPEVTCVVVDVSHEDPEVKFNWYVDGVEVHNAKTKPREEQYNSTYRVVSVLTVLHQDWLNGKEYKCKVSNKALGAPIEKTISKAKGQPREPQVYTLPPSRDELTKNQVSLSCAVKGFYPSDIAVEWESNGQPENNYKTTPPVLDSDGSFFLVSKLTVDKSRWQQGNVFSCSVMHEALHNHYTQKSLSLSPGKGGGGSGGGGSGGGGSREGCASRCMKYNDELEKCEARMMSMSNTEEDCEQELEDLLYCLDHCHSQ

SEQ ID NO: 360 - protein, 303 aa, Artificial Sequence
  Description of Artificial Sequence: Synthetic polypeptide
EEDCKVHCVKEWMAGKACAERQKSYTIGRAHCSGQKFDVFKCLDHCAAPGTGGGGSGGGGSGGGGSGGGGSEPKSCDKTHTCPPCPAPEAAGGPSVFLFPPKPKDTLMISRTPEVTCVVVDVSHEDPEVKFNWYVDGVEVHNAKTKPREEQYNSTYRVVSVLTVLHQDWLNGKEYKCKVSNKALGAPIEKTISKAKGQPREPQVYTLPPSRDELTKNQVSLWCLVKGFYPSDIAVEWESNGQPENNYKTTPPVLDSDGSFFLYSKLTVDKSRWQQGNVFSCSVMHEALHNHYTQKSLSLSPGK

SEQ ID NO: 361 - protein, 193 aa, Artificial Sequence
  Description of Artificial Sequence: Synthetic polypeptide
EEDCKVHCVKEWMAGKACAERQKSYTIGRAHCSGQKFDVFKCLDHCAAPGTGSPVPSTPPTPSPSTPPTPSPSASLKEAKEKAIEELKKAGITSDYYFDLINKAKTVEGVNALKDEILKAGSPVPSTPPTPSPSTPPTPSPSASREGCASRCMKYNDELEKCEARMMSMSNTEEDCEQELEDLLYCLDHCHSQ

SEQ ID NO: 362 - protein, 193 aa, Artificial Sequence
  Description of Artificial Sequence: Synthetic polypeptide
EEDCKVHCVKEWMAGKACAERQKSYTIGRAHCSGQKFDVFKCLDHCAAPGTGSPVPSTPPTPSPSTPPTPSPSASLKEAKEKAIEELKKAGITSDYYFDLINKAKAVEGVNALKDEILKAGSPVPSTPPTPSPSTPPTPSPSASREGCASRCMKYNDELEKCEARMMSMSNTEEDCEQELEDLLYCLDHCHSQ

SEQ ID NO: 363 - protein, 307 aa, Artificial Sequence
  Description of Artificial Sequence: Synthetic polypeptide
EEDCKVHCVKEWMAGKACAERQKSYTIGRAHCSGQKFDVFKCLDHCAAPGTGSPVPSTPPTPSPSTPPTPSPSASEPKSCDKTHTCPPCPAPEAAGGPSVFLFPPKPKDTLMISRTPEVTCVVVDVSHEDPEVKFNWYVDGVEVHNAKTKPREEQYNSTYRVVSVLTVLHQDWLNGKEYKCKVSNKALGAPIEKTISKAKGQPREPQVYTLPPSRDELTKNQVSLSCAVKGFYPSDIAVEWESNGQPENNYKTTPPVLDSDGSFFLVSKLTVDKSRWQQGNVFSCSVMHEALHNHYTQKSLSLSPGK

SEQ ID NO: 364 - protein, 371 aa, Artificial Sequence
  Description of Artificial Sequence: Synthetic polypeptide
EEDCKVHCVKEWMAGKACAERQKSYTIGRAHCSGQKFDVFKCLDHCAAPGTGSPVPSTPPTPSPSTPPTPSPSASEPKSCDKTHTCPPCPAPEAAGGPSVFLFPPKPKDTLMISRTPEVTCVVVDVSHEDPEVKFNWYVDGVEVHNAKTKPREEQYNSTYRVVSVLTVLHQDWLNGKEYKCKVSNKALGAPIEKTISKAKGQPREPQVYTLPPSRDELTKNQVSLSCAVKGFYPSDIAVEWESNGQPENNYKTTPPVLDSDGSFFLVSKLTVDKSRWQQGNVFSCSVMHEALHNHYTQKSLSLSPGKGGGGSGGGGSGGGGSREGCASRCMKYNDELEKCEARMMSMSNTEEDCEQELEDLLYCLDHCHSQ

SEQ ID NO: 365 - protein, 307 aa, Artificial Sequence
  Description of Artificial Sequence: Synthetic polypeptide
EEDCKVHCVKEWMAGKACAERQKSYTIGRAHCSGQKFDVFKCLDHCAAPGTGSPVPSTPPTPSPSTPPTPSPSASEPKSCDKTHTCPPCPAPEAAGGPSVFLFPPKPKDTLMISRTPEVTCVVVDVSHEDPEVKFNWYVDGVEVHNAKTKPREEQYNSTYRVVSVLTVLHQDWLNGKEYKCKVSNKALGAPIEKTISKAKGQPREPQVYTLPPSRDELTKNQVSLWCLVKGFYPSDIAVEWESNGQPENNYKTTPPVLDSDGSFFLYSKLTVDKSRWQQGNVFSCSVMHEALHNHYTQKSLSLSPGK

SEQ ID NO: 366 - protein, 185 aa, Artificial Sequence
  Description of Artificial Sequence: Synthetic polypeptide
EHDCKVHCVKEWMAGHACAERQKSYTIGRAHCSGQKFDVFKCLDHCAAPGTGGGGSGGGGSGGGGSGGGGSLKEAKEKAIEELKKAGITSDYYFDLINKAKAVEGVNALKDEILKAGGGGSGGGGSGGGGSGGGGSREGCASHCTKYKAELEKCEARVSSRSNTEETCVQELFDFLHCVDHCVSQ

SEQ ID NO: 367 - protein, 189 aa, Artificial Sequence
  Description of Artificial Sequence: Synthetic polypeptide
NSDSECPLSHDGYCLHGGVCMYIKAVDRYACNCVVGYIGERCQYRDLTWWGPRGTGGGGSGGGGSGGGGSGGGGSLKEAKEKAIEELKKAGITSDYYFDLINKAKAVEGVNALKDEILKAGGGGSGGGGSGGGGSGGGGSREGCASHCTKYKAELEKCEARVSSRSNTEETCVQELFDFLHCVDHCVSQ

SEQ ID NO: 368 - protein, 260 aa, Artificial Sequence
  Description of Artificial Sequence: Synthetic polypeptide
QVKLEESGGGSVQTGGSLRLTCAASGRTSRSYGMGWFRQAPGKEREFVSGISWRGDSTGYADSVKGRFTISRDNAKNTVDLQMNSLKPEDTAIYYCAAAAGSAWYGTLYEYDYWGQGTQVTVSSGTGGGGSGGGGSGGGGSGGGGSLKEAKEKAIEELKKAGITSDYYFDLINKAKTVEGVNALKDEILKAGGGGSGGGGSGGGGSGGGGSREGCASRCMKYNDELEKCEARMMSMSNTEEDCEQELEDLLYCLDHCHSQ

SEQ ID NO: 369 - protein, 260 aa, Artificial Sequence
  Description of Artificial Sequence: Synthetic polypeptide
QVKLEESGGGSVQTGGSLRLTCAASGRTSRSYGMGWFRQAPGKEREFVSGISWRGDSTGYADSVKGRFTISRDNAKNTVDLQMNSLKPEDTAIYYCAAAAGSAWYGTLYEYDYWGQGTQVTVSSGTGGGGSGGGGSGGGGSGGGGSLKEAKEKAIEELKKAGITSDYYFDLINKAKAVEGVNALKDEILKAGGGGSGGGGSGGGGSGGGGSREGCASRCMKYNDELEKCEARMMSMSNTEEDCEQELEDLLYCLDHCHSQ

SEQ ID NO: 370 - protein, 260 aa, Artificial Sequence
  Description of Artificial Sequence: Synthetic polypeptide
QVKLEESGGGSVQTGGSLRLTCAASGRTSRSYGMGWFRQAPGKEREFVSGISWRGDSTGYADSVKGRFTISRDNAKNTVDLQMNSLKPEDTAIYYCAAAAGSAWYGTLYEYDYWGQGTQVTVSSGTGGGGSGGGGSGGGGSGGGGSLKEAKEKAIEELKKAGITSDYYFDLINKAKAVEGVNALKDEILKAGGGGSGGGGSGGGGSGGGGSREGCASHCTKYKAELEKCEARVSSRSNTEETCVQELFDFLHCVDHCVSQ

SEQ ID NO: 371 - protein, 378 aa, Artificial Sequence
  Description of Artificial Sequence: Synthetic polypeptide
QVKLEESGGGSVQTGGSLRLTCAASGRTSRSYGMGWFRQAPGKEREFVSGISWRGDSTGYADSVKGRFTISRDNAKNTVDLQMNSLKPEDTAIYYCAAAAGSAWYGTLYEYDYWGQGTQVTVSSGTGGGGSGGGGSGGGGSGGGGSEPKSCDKTHTCPPCPAPEAAGGPSVFLFPPKPKDTLMISRTPEVTCVVVDVSHEDPEVKFNWYVDGVEVHNAKTKPREEQYNSTYRVVSVLTVLHQDWLNGKEYKCKVSNKALGAPIEKTISKAKGQPREPQVYTLPPSRDELTKNQVSLSCAVKGFYPSDIAVEWESNGQPENNYKTTPPVLDSDGSFFLVSKLTVDKSRWQQGNVFSCSVMHEALHNHYTQKSLSLSPGK

SEQ ID NO: 372 - protein, 442 aa, Artificial Sequence
  Description of Artificial Sequence: Synthetic polypeptide
QVKLEESGGGSVQTGGSLRLTCAASGRTSRSYGMGWFRQAPGKEREFVSGISWRGDSTGYADSVKGRFTISRDNAKNTVDLQMNSLKPEDTAIYYCAAAAGSAWYGTLYEYDYWGQGTQVTVSSGTGGGGSGGGGSGGGGSGGGGSEPKSCDKTHTCPPCPAPEAAGGPSVFLFPPKPKDTLMISRTPEVTCVVVDVSHEDPEVKFNWYVDGVEVHNAKTKPREEQYNSTYRVVSVLTVLHQDWLNGKEYKCKVSNKALGAPIEKTISKAKGQPREPQVYTLPPSRDELTKNQVSLSCAVKGFYPSDIAVEWESNGQPENNYKTTPPVLDSDGSFFLVSKLTVDKSRWQQGNVFSCSVMHEALHNHYTQKSLSLSPGKGGGGSGGGGSGGGGSREGCASRCMKYNDELEKCEARMMSMSNTEEDCEQELEDLLYCLDHCHSQ

SEQ ID NO: 373 - protein, 378 aa, Artificial Sequence
  Description of Artificial Sequence: Synthetic polypeptide
QVKLEESGGGSVQTGGSLRLTCAASGRTSRSYGMGWFRQAPGKEREFVSGISWRGDSTGYADSVKGRFTISRDNAKNTVDLQMNSLKPEDTAIYYCAAAAGSAWYGTLYEYDYWGQGTQVTVSSGTGGGGSGGGGSGGGGSGGGGSEPKSCDKTHTCPPCPAPEAAGGPSVFLFPPKPKDTLMISRTPEVTCVVVDVSHEDPEVKFNWYVDGVEVHNAKTKPREEQYNSTYRVVSVLTVLHQDWLNGKEYKCKVSNKALGAPIEKTISKAKGQPREPQVYTLPPSRDELTKNQVSLWCLVKGFYPSDIAVEWESNGQPENNYKTTPPVLDSDGSFFLYSKLTVDKSRWQQGNVFSCSVMHEALHNHYTQKSLSLSPGK

SEQ ID NO: 374 - protein, 268 aa, Artificial Sequence
  Description of Artificial Sequence: Synthetic polypeptide
QVKLEESGGGSVQTGGSLRLTCAASGRTSRSYGMGWFRQAPGKEREFVSGISWRGDSTGYADSVKGRFTISRDNAKNTVDLQMNSLKPEDTAIYYCAAAAGSAWYGTLYEYDYWGQGTQVTVSSGTGSPVPSTPPTPSPSTPPTPSPSASLKEAKEKAIEELKKAGITSDYYFDLINKAKTVEGVNALKDEILKAGSPVPSTPPTPSPSTPPTPSPSASREGCASRCMKYNDELEKCEARMMSMSNTEEDCEQELEDLLYCLDHCHSQ

SEQ ID NO: 375 - protein, 268 aa, Artificial Sequence
  Description of Artificial Sequence: Synthetic polypeptide
QVKLEESGGGSVQTGGSLRLTCAASGRTSRSYGMGWFRQAPGKEREFVSGISWRGDSTGYADSVKGRFTISRDNAKNTVDLQMNSLKPEDTAIYYCAAAAGSAWYGTLYEYDYWGQGTQVTVSSGTGSPVPSTPPTPSPSTPPTPSPSASLKEAKEKAIEELKKAGITSDYYFDLINKAKAVEGVNALKDEILKAGSPVPSTPPTPSPSTPPTPSPSASREGCASRCMKYNDELEKCEARMMSMSNTEEDCEQELEDLLYCLDHCHSQ

SEQ ID NO: 376 - protein, 382 aa, Artificial Sequence
  Description of Artificial Sequence: Synthetic polypeptide
QVKLEESGGGSVQTGGSLRLTCAASGRTSRSYGMGWFRQAPGKEREFVSGISWRGDSTGYADSVKGRFTISRDNAKNTVDLQMNSLKPEDTAIYYCAAAAGSAWYGTLYEYDYWGQGTQVTVSSGTGSPVPSTPPTPSPSTPPTPSPSASEPKSCDKTHTCPPCPAPEAAGGPSVFLFPPKPKDTLMISRTPEVTCVVVDVSHEDPEVKFNWYVDGVEVHNAKTKPREEQYNSTYRVVSVLTVLHQDWLNGKEYKCKVSNKALGAPIEKTISKAKGQPREPQVYTLPPSRDELTKNQVSLSCAVKGFYPSDIAVEWESNGQPENNYKTTPPVLDSDGSFFLVSKLTVDKSRWQQGNVFSCSVMHEALHNHYTQKSLSLSPGK

SEQ ID NO: 377 - protein, 446 aa, Artificial Sequence
  Description of Artificial Sequence: Synthetic polypeptide
QVKLEESGGGSVQTGGSLRLTCAASGRTSRSYGMGWFRQAPGKEREFVSGISWRGDSTGYADSVKGRFTISRDNAKNTVDLQMNSLKPEDTAIYYCAAAAGSAWYGTLYEYDYWGQGTQVTVSSGTGSPVPSTPPTPSPSTPPTPSPSASEPKSCDKTHTCPPCPAPEAAGGPSVFLFPPKPKDTLMISRTPEVTCVVVDVSHEDPEVKFNWYVDGVEVHNAKTKPREEQYNSTYRVVSVLTVLHQDWLNGKEYKCKVSNKALGAPIEKTISKAKGQPREPQVYTLPPSRDELTKNQVSLSCAVKGFYPSDIAVEWESNGQPENNYKTTPPVLDSDGSFFLVSKLTVDKSRWQQGNVFSCSVMHEALHNHYTQKSLSLSPGKGGGGSGGGGSGGGGSREGCASRCMKYNDELEKCEARMMSMSNTEEDCEQELEDLLYCLDHCHSQ

SEQ ID NO: 378 - protein, 382 aa, Artificial Sequence
  Description of Artificial Sequence: Synthetic polypeptide
QVKLEESGGGSVQTGGSLRLTCAASGRTSRSYGMGWFRQAPGKEREFVSGISWRGDSTGYADSVKGRFTISRDNAKNTVDLQMNSLKPEDTAIYYCAAAAGSAWYGTLYEYDYWGQGTQVTVSSGTGSPVPSTPPTPSPSTPPTPSPSASEPKSCDKTHTCPPCPAPEAAGGPSVFLFPPKPKDTLMISRTPEVTCVVVDVSHEDPEVKFNWYVDGVEVHNAKTKPREEQYNSTYRVVSVLTVLHQDWLNGKEYKCKVSNKALGAPIEKTISKAKGQPREPQVYTLPPSRDELTKNQVSLWCLVKGFYPSDIAVEWESNGQPENNYKTTPPVLDSDGSFFLYSKLTVDKSRWQQGNVFSCSVMHEALHNHYTQKSLSLSPGK

SEQ ID NO: 379 - protein, 260 aa, Artificial Sequence
  Description of Artificial Sequence: Synthetic polypeptide
QVKLEESGGGSVQTGGSLRLTCAASGHTSRSYGMGWFRQAPGKEREFVSGISWRGDSTGYADSVKGRFTISRDNAKNTVDLQMNSLKPEDTAIYYCAAAAGSAWYHTLYEYDYWGQGTQVTVSSGTGGGGSGGGGSGGGGSGGGGSLKEAKEKAIEELKKAGITSDYYFDLINKAKTVEGVNALKDEILKAGGGGSGGGGSGGGGSGGGGSREGCASRCMKYNDELEKCEARMMSMSNTEEDCEQELEDLLYCLDHCHSQ

SEQ ID NO: 380 - protein, 260 aa, Artificial Sequence
  Description of Artificial Sequence: Synthetic polypeptide
QVKLEESGGGSVQTGGSLRLTCAASGHTSRSYGMGWFRQAPGKEREFVSGISWRGDSTGYADSVKGRFTISRDNAKNTVDLQMNSLKPEDTAIYYCAAAAGSAWYHTLYEYDYWGQGTQVTVSSGTGGGGSGGGGSGGGGSGGGGSLKEAKEKAIEELKKAGITSDYYFDLINKAKAVEGVNALKDEILKAGGGGSGGGGSGGGGSGGGGSREGCASRCMKYNDELEKCEARMMSMSNTEEDCEQELEDLLYCLDHCHSQ

SEQ ID NO: 381 - protein, 260 aa, Artificial Sequence
  Description of Artificial Sequence: Synthetic polypeptide
QVKLEESGGGSVQTGGSLRLTCAASGHTSRSYGMGWFRQAPGKEREFVSGISWRGDSTGYADSVKGRFTISRDNAKNTVDLQMNSLKPEDTAIYYCAAAAGSAWYHTLYEYDYWGQGTQVTVSSGTGGGGSGGGGSGGGGSGGGGSLKEAKEKAIEELKKAGITSDYYFDLINKAKAVEGVNALKDEILKAGGGGSGGGGSGGGGSGGGGSREGCASHCTKYKAELEKCEARVSSRSNTEETCVQELFDFLHCVDHCVSQ

SEQ ID NO: 382 - protein, 378 aa, Artificial Sequence
  Description of Artificial Sequence: Synthetic polypeptide
QVKLEESGGGSVQTGGSLRLTCAASGHTSRSYGMGWFRQAPGKEREFVSGISWRGDSTGYADSVKGRFTISRDNAKNTVDLQMNSLKPEDTAIYYCAAAAGSAWYHTLYEYDYWGQGTQVTVSSGTGGGGSGGGGSGGGGSGGGGSEPKSCDKTHTCPPCPAPEAAGGPSVFLFPPKPKDTLMISRTPEVTCVVVDVSHEDPEVKFNWYVDGVEVHNAKTKPREEQYNSTYRVVSVLTVLHQDWLNGKEYKCKVSNKALGAPIEKTISKAKGQPREPQVYTLPPSRDELTKNQVSLSCAVKGFYPSDIAVEWESNGQPENNYKTTPPVLDSDGSFFLVSKLTVDKSRWQQGNVFSCSVMHEALHNHYTQKSLSLSPGK

SEQ ID NO: 383 - protein, 442 aa, Artificial Sequence
  Description of Artificial Sequence: Synthetic polypeptide
QVKLEESGGGSVQTGGSLRLTCAASGHTSRSYGMGWFRQAPGKEREFVSGISWRGDSTGYADSVKGRFTISRDNAKNTVDLQMNSLKPEDTAIYYCAAAAGSAWYHTLYEYDYWGQGTQVTVSSGTGGGGSGGGGSGGGGSGGGGSEPKSCDKTHTCPPCPAPEAAGGPSVFLFPPKPKDTLMISRTPEVTCVVVDVSHEDPEVKFNWYVDGVEVHNAKTKPREEQYNSTYRVVSVLTVLHQDWLNGKEYKCKVSNKALGAPIEKTISKAKGQPREPQVYTLPPSRDELTKNQVSLSCAVKGFYPSDIAVEWESNGQPENNYKTTPPVLDSDGSFFLVSKLTVDKSRWQQGNVFSCSVMHEALHNHYTQKSLSLSPGKGGGGSGGGGSGGGGSREGCASRCMKYNDELEKCEARMMSMSNTEEDCEQELEDLLYCLDHCHSQ

SEQ ID NO: 384 - protein, 378 aa, Artificial Sequence
  Description of Artificial Sequence: Synthetic polypeptide
QVKLEESGGGSVQTGGSLRLTCAASGHTSRSYGMGWFRQAPGKEREFVSGISWRGDSTGYADSVKGRFTISRDNAKNTVDLQMNSLKPEDTAIYYCAAAAGSAWYHTLYEYDYWGQGTQVTVSSGTGGGGSGGGGSGGGGSGGGGSEPKSCDKTHTCPPCPAPEAAGGPSVFLFPPKPKDTLMISRTPEVTCVVVDVSHEDPEVKFNWYVDGVEVHNAKTKPREEQYNSTYRVVSVLTVLHQDWLNGKEYKCKVSNKALGAPIEKTISKAKGQPREPQVYTLPPSRDELTKNQVSLWCLVKGFYPSDIAVEWESNGQPENNYKTTPPVLDSDGSFFLYSKLTVDKSRWQQGNVFSCSVMHEALHNHYTQKSLSLSPGK

SEQ ID NO: 385 - protein, 268 aa, Artificial Sequence
  Description of Artificial Sequence: Synthetic polypeptide
QVKLEESGGGSVQTGGSLRLTCAASGHTSRSYGMGWFRQAPGKEREFVSGISWRGDSTGYADSVKGRFTISRDNAKNTVDLQMNSLKPEDTAIYYCAAAAGSAWYHTLYEYDYWGQGTQVTVSSGTGSPVPSTPPTPSPSTPPTPSPSASLKEAKEKAIEELKKAGITSDYYFDLINKAKTVEGVNALKDEILKAGSPVPSTPPTPSPSTPPTPSPSASREGCASRCMKYNDELEKCEARMMSMSNTEEDCEQELEDLLYCLDHCHSQ

SEQ ID NO: 386 - protein, 268 aa, Artificial Sequence
  Description of Artificial Sequence: Synthetic polypeptide
QVKLEESGGGSVQTGGSLRLTCAASGHTSRSYGMGWFRQAPGKEREFVSGISWRGDSTGYADSVKGRFTISRDNAKNTVDLQMNSLKPEDTAIYYCAAAAGSAWYHTLYEYDYWGQGTQVTVSSGTGSPVPSTPPTPSPSTPPTPSPSASLKEAKEKAIEELKKAGITSDYYFDLINKAKAVEGVNALKDEILKAGSPVPSTPPTPSPSTPPTPSPSASREGCASRCMKYNDELEKCEARMMSMSNTEEDCEQELEDLLYCLDHCHSQ

SEQ ID NO: 387 - protein, 382 aa, Artificial Sequence
  Description of Artificial Sequence: Synthetic polypeptide
QVKLEESGGGSVQTGGSLRLTCAASGHTSRSYGMGWFRQAPGKEREFVSGISWRGDSTGYADSVKGRFTISRDNAKNTVDLQMNSLKPEDTAIYYCAAAAGSAWYHTLYEYDYWGQGTQVTVSSGTGSPVPSTPPTPSPSTPPTPSPSASEPKSCDKTHTCPPCPAPEAAGGPSVFLFPPKPKDTLMISRTPEVTCVVVDVSHEDPEVKFNWYVDGVEVHNAKTKPREEQYNSTYRVVSVLTVLHQDWLNGKEYKCKVSNKALGAPIEKTISKAKGQPREPQVYTLPPSRDELTKNQVSLSCAVKGFYPSDIAVEWESNGQPENNYKTTPPVLDSDGSFFLVSKLTVDKSRWQQGNVFSCSVMHEALHNHYTQKSLSLSPGK

SEQ ID NO: 388 - protein, 446 aa, Artificial Sequence
  Description of Artificial Sequence: Synthetic polypeptide
QVKLEESGGGSVQTGGSLRLTCAASGHTSRSYGMGWFRQAPGKEREFVSGISWRGDSTGYADSVKGRFTISRDNAKNTVDLQMNSLKPEDTAIYYCAAAAGSAWYHTLYEYDYWGQGTQVTVSSGTGSPVPSTPPTPSPSTPPTPSPSASEPKSCDKTHTCPPCPAPEAAGGPSVFLFPPKPKDTLMISRTPEVTCVVVDVSHEDPEVKFNWYVDGVEVHNAKTKPREEQYNSTYRVVSVLTVLHQDWLNGKEYKCKVSNKALGAPIEKTISKAKGQPREPQVYTLPPSRDELTKNQVSLSCAVKGFYPSDIAVEWESNGQPENNYKTTPPVLDSDGSFFLVSKLTVDKSRWQQGNVFSCSVMHEALHNHYTQKSLSLSPGKGGGGSGGGGSGGGGSREGCASRCMKYNDELEKCEARMMSMSNTEEDCEQELEDLLYCLDHCHSQ

SEQ ID NO: 389 - protein, 382 aa, Artificial Sequence
  Description of Artificial Sequence: Synthetic polypeptide
QVKLEESGGGSVQTGGSLRLTCAASGHTSRSYGMGWFRQAPGKEREFVSGISWRGDSTGYADSVKGRFTISRDNAKNTVDLQMNSLKPEDTAIYYCAAAAGSAWYHTLYEYDYWGQGTQVTVSSGTGSPVPSTPPTPSPSTPPTPSPSASEPKSCDKTHTCPPCPAPEAAGGPSVFLFPPKPKDTLMISRTPEVTCVVVDVSHEDPEVKFNWYVDGVEVHNAKTKPREEQYNSTYRVVSVLTVLHQDWLNGKEYKCKVSNKALGAPIEKTISKAKGQPREPQVYTLPPSRDELTKNQVSLWCLVKGFYPSDIAVEWESNGQPENNYKTTPPVLDSDGSFFLYSKLTVDKSRWQQGNVFSCSVMHEALHNHYTQKSLSLSPGK

SEQ ID NO: 390 - protein, 260 aa, Artificial Sequence
  Description of Artificial Sequence: Synthetic polypeptide
QVKLEESGGGSVQTGGSLRLTCAASGHTSRSYGMHWFRQAPGKEREFVSGISWRGDSTGYADSVKGRFTISRDNAKNTVDLQMNSLKPEDTAIYYCAAAAGSHWYGTHYEYDYWGQGTQVTVSSGTGGGGSGGGGSGGGGSGGGGSLKEAKEKAIEELKKAGITSDYYFDLINKAKAVEGVNALKDEILKAGGGGSGGGGSGGGGSGGGGSREGCASHCTKYKAELEKCEARVSSRSNTEETCVQELFDFLHCVDHCVSQ

SEQ ID NO: 391 - protein, 20 aa, Artificial Sequence
  Description of Artificial Sequence: Synthetic peptide
PVPSTPPTPSPSTPPTPSPS

SEQ ID NO: 392 - protein, 49 aa, Artificial Sequence
  Description of Artificial Sequence: Synthetic polypeptide
  MOD_RES (1)..(1): E, M, V, or W
  MOD_RES (2)..(2): G, E, L, or F
  MOD_RES (3)..(3): D, E, or S
  MOD_RES (5)..(5): K, R, or V
  MOD_RES (6)..(6): E, Q, S, M, L, or V
  MOD_RES (7)..(7): D, E, H, K, R, N, Q, S, or Y
  MOD_RES (9)..(9): D, M, or V
  MOD_RES (10)..(10): A, K, R, Q, S, or T
  MOD_RES (11)..(11): A, D, E, H, Q, S, T, M, I, L, V, or W
  MOD_RES (12)..(12): A, E, R, Q, S, T, W, or P
  MOD_RES (13)..(13): A, E, K, R, N, Q, T, M, I, L, V, or W
  MOD_RES (14)..(14): G, A, E, K, N, T, or Y
  MOD_RES (15)..(15): G, A, D, E, H, K, R, N, Q, S, T, M, I, L, V, W, Y, or P
  MOD_RES (16)..(16): D, K, R, N, L, or V
  MOD_RES (17)..(17): G, A, D, T, L, W, or P
  MOD_RES (19)..(19): G, A, E, H, K, N, S, F, or P
  MOD_RES (20)..(20): G, A, D, E, N, or P
  MOD_RES (21)..(21): G, D, H, K, R, N, Q, S, T, V, or Y
  MOD_RES (22)..(22): G, D, E, H, K, N, Q, S, T, M, I, F, W, Y, or P
  MOD_RES (23)..(23): G, A, D, E, H, K, R, N, Q, S, Y, or P
  MOD_RES (24)..(24): G, A, D, H, N, Q, S, V, F, or P
  MOD_RES (25)..(25): A, D, H, N, Q, S, T, M, I, V, Y, or P
  MOD_RES (26)..(26): G, A, D, K, R, T, W, or Y
  MOD_RES (27)..(27): G, A, E, N, Q, T, I, V, or P
  MOD_RES (28)..(28): G, D, N, Q, T, L, V, F, or P
  MOD_RES (29)..(29): G, A, E, K, R, N, Q, S, T, I, Y, or P
  MOD_RES (30)..(30): A, D, N, or I
  MOD_RES (31)..(31): G, D, E, H, N, F, or W
  MOD_RES (33)..(33): G, A, E, N, S, Y, or P
  MOD_RES (34)..(34): G, M, or L
  MOD_RES (35)..(35): G, A, D, K, N, Q, or W
  MOD_RES (36)..(36): D, E, H, K, N, Q, S, T, L, V, F, Y, or P
  MOD_RES (37)..(37): G, E, Q, or F
  MOD_RES (38)..(38): D or K
  MOD_RES (39)..(39): G, V, or P
  MOD_RES (40)..(40): G, H, R, V, F, W, or P
  MOD_RES (41)..(41): A, D, or K
  MOD_RES (43)..(43): E, H, Q, L, or F
  MOD_RES (44)..(44): D, E, R, S, T, M, L, or F
  MOD_RES (45)..(45): G, A, D, E, H, K, R, M, L, or P
  MOD_RES (47)..(47): G, A, K, S, I, or L
  MOD_RES (48)..(48): G, A, D, E, R, Q, T, or F
  MOD_RES (49)..(49): A, H, N, Q, S, F, or P
XXXCXXXCXXXXXXXXXCXXXXXXXXXXXXXCXXXXXXXXXCXXXCXXX

SEQ ID NO: 393 - protein, 49 aa, Artificial Sequence
  Description of Artificial Sequence: Synthetic polypeptide
  MOD_RES (7)..(7): Any non-cysteine amino acid
  MOD_RES (10)..(10): Any non-cysteine amino acid
  MOD_RES (11)..(11): Any non-cysteine amino acid
  MOD_RES (12)..(12): Any non-cysteine amino acid
  MOD_RES (13)..(13): Any non-cysteine amino acid
  MOD_RES (14)..(14): M, I, L, or V
  MOD_RES (15)..(15): Y, A, H, K, R, N, Q, S, or T
  MOD_RES (17)..(17): Any non-cysteine amino acid
  MOD_RES (19)..(19): Any non-cysteine amino acid
  MOD_RES (21)..(21): Any non-cysteine amino acid
  MOD_RES (22)..(22): D, E, N, Q, or P
  MOD_RES (23)..(23): Any non-cysteine amino acid
  MOD_RES (24)..(24): Any non-cysteine amino acid
  MOD_RES (25)..(25): Any non-cysteine amino acid
  MOD_RES (26)..(26): Any non-cysteine amino acid
  MOD_RES (27)..(27): Any non-cysteine amino acid
  MOD_RES (28)..(28): Any non-cysteine amino acid
  MOD_RES (29)..(29): Any non-cysteine amino acid
  MOD_RES (31)..(31): Any non-cysteine amino acid
  MOD_RES (33)..(33): Any non-cysteine amino acid
  MOD_RES (35)..(35): Any non-cysteine amino acid
  MOD_RES (36)..(36): K or P
  MOD_RES (38)..(38): D or K
  MOD_RES (41)..(41): D or K
  MOD_RES (44)..(44): Any non-cysteine amino acid
  MOD_RES (45)..(45): Any non-cysteine amino acid
  MOD_RES (47)..(47): Any non-cysteine amino acid
  MOD_RES (48)..(48): Any non-cysteine amino acid
  MOD_RES (49)..(49): Any non-cysteine amino acid
EEDCKVXCVXXXXXXKXCXEXXXXXXXXXAXCXGXXFXVFXCLXXCXXX

SEQ ID NO: 394 - protein, 15 aa, Artificial Sequence
  Description of Artificial Sequence: Synthetic peptide
  MOD_RES (2)..(2): K, R, or V
  MOD_RES (3)..(3): E, Q, S, M, L, or V
  MOD_RES (4)..(4): D, E, H, K, R, N, Q, S, or Y
  MOD_RES (6)..(6): D, M, or V
  MOD_RES (7)..(7): A, K, R, Q, S, or T
  MOD_RES (8)..(8): A, D, E, H, Q, S, T, M, I, L, V, or W
  MOD_RES (9)..(9): A, E, R, Q, S, T, W, or P
  MOD_RES (10)..(10): A, E, K, R, N, Q, T, M, I, L, V, or W
  MOD_RES (11)..(11): G, A, E, K, N, T, or Y
  MOD_RES (12)..(12): G, A, D, E, H, K, R, N, Q, S, T, M, I, L, V, W, Y, or P
  MOD_RES (13)..(13): D, K, R, N, L, or V
  MOD_RES (14)..(14): G, A, D, T, L, W, or P
CXXXCXXXXXXXXXC

SEQ ID NO: 395 - protein, 11 aa, Artificial Sequence
  Description of Artificial Sequence: Synthetic peptide
  MOD_RES (1)..(1): D, E, H, K, N, Q, S, T, L, V, F, Y, or P
  MOD_RES (2)..(2): G, E, Q, or F
  MOD_RES (3)..(3): D or K
  MOD_RES (4)..(4): G, V, or P
  MOD_RES (5)..(5): G, H, R, V, F, W, or P
  MOD_RES (6)..(6): A, D, or K
  MOD_RES (8)..(8): E, H, Q, L, or F
  MOD_RES (9)..(9): D, E, R, S, T, M, L, or F
  MOD_RES (10)..(10): G, A, D, E, H, K, R, M, L, or P
XXXXXXCXXXC

SEQ ID NO: 396 - protein, 15 aa, Artificial Sequence
  Description of Artificial Sequence: Synthetic peptide
  MOD_RES (4)..(4): Any non-cysteine amino acid
  MOD_RES (7)..(7): Any non-cysteine amino acid
  MOD_RES (8)..(8): Any non-cysteine amino acid
  MOD_RES (9)..(9): Any non-cysteine amino acid
  MOD_RES (10)..(10): Any non-cysteine amino acid
  MOD_RES (11)..(11): M, I, L, or V
  MOD_RES (12)..(12): Y, A, H, K, R, N, Q, S, or T
  MOD_RES (14)..(14): Any non-cysteine amino acid
CKVXCVXXXXXXKXC

SEQ ID NO: 397 - protein, 11 aa, Artificial Sequence
  Description of Artificial Sequence: Synthetic peptide
  MOD_RES (1)..(1): K or P
  MOD_RES (3)..(3): D or K
  MOD_RES (6)..(6): D or K
  MOD_RES (9)..(9): Any non-cysteine amino acid
  MOD_RES (10)..(10): Any non-cysteine amino acid
XFXVFXCLXXC

SEQ ID NO: 398 - protein, 15 aa, Artificial Sequence
  Description of Artificial Sequence: Synthetic peptide
CKVHCVKEWMAGKAC

SEQ ID NO: 399 - protein, 11 aa, Artificial Sequence
  Description of Artificial Sequence: Synthetic peptide
KFDVFKCLDHC

SEQ ID NO: 400 - protein, 49 aa, Artificial Sequence
  Description of Artificial Sequence: Synthetic polypeptide
EEDCKVHCVKEWMAGKACAERDKSYTIGRAHCSGQKFDVFKCLDHCAAP

SEQ ID NO: 401 - protein, 49 aa, Artificial Sequence
  Description of Artificial Sequence: Synthetic polypeptide
EEDCKVHCVKEWMAGKACAERNKSYTIGRAHCSGQKFDVFKCLDHCAAP

SEQ ID NO: 402 - protein, 49 aa, Artificial Sequence
  Description of Artificial Sequence: Synthetic polypeptide
EEDCKVHCVKEWAAYKACAERIKSYTIGRAHCSGQYFDVWKCLDHCAAP

SEQ ID NO: 403 - protein, 48 aa, Artificial Sequence
  Description of Artificial Sequence: Synthetic polypeptide
ARTCESQSHRFKGPCVSMTNCASVCRTERFSGGHCRGFRRRCLCTKHC

SEQ ID NO: 404 - protein, 48 aa, Artificial Sequence
  Description of Artificial Sequence: Synthetic polypeptide
ARTCESQSHRFKGPCVSDTNCASVCYTERFSGGHCRGFRRRCLCTKHC

SEQ ID NO: 405 - protein, 48 aa, Artificial Sequence
  Description of Artificial Sequence: Synthetic polypeptide
ARTCESQSHRFKGPCVSDTNCASVCRTERFSGGHCMGFRRRCLCTKHC

SEQ ID NO: 406 - protein, 49 aa, Artificial Sequence
  Description of Artificial Sequence: Synthetic polypeptide
EEDCKVHCVKWWMAGKACAERNKSYTIGRAHCSGQKFDVFKCLDHCAAP

SEQ ID NO: 407 - protein, 49 aa, Artificial Sequence
  Description of Artificial Sequence: Synthetic polypeptide
EEDCKVHCVKWWAAGKACAERNKSYTIGRAHCSGQKFDVFKCLDHCAAP

SEQ ID NO: 408 - protein, 49 aa, Artificial Sequence
  Description of Artificial Sequence: Synthetic polypeptide
EEDCKVHCVKWWMAYKACAERNKSYTIGRAHCSGQKFDVFKCLDHCAAP

SEQ ID NO: 409 - protein, 49 aa, Artificial Sequence
  Description of Artificial Sequence: Synthetic polypeptide
EEDCKVHCVKWWMAGKACAERIKSYTIGRAHCSGQKFDVFKCLDHCAAP

SEQ ID NO: 410 - protein, 49 aa, Artificial Sequence
  Description of Artificial Sequence: Synthetic polypeptide
EEDCKVHCVKWWMAGKACAERNKSYTIGRAHCSGQYFDVFKCLDHCAAP

SEQ ID NO: 411 - protein, 49 aa, Artificial Sequence
  Description of Artificial Sequence: Synthetic polypeptide
EEDCKVHCVKWWMAGKACAERNKSYTIGRAHCSGQKFDVWKCLDHCAAP

SEQ ID NO: 412 - protein, 49 aa, Artificial Sequence
  Description of Artificial Sequence: Synthetic polypeptide
EEDCKVHCVKWWAAYKACAERIKSYTIGRAHCSGQYFDVWKCLDHCAAP

SEQ ID NO: 413 - protein, 49 aa, Artificial Sequence
  Description of Artificial Sequence: Synthetic polypeptide
EEDCKVHCVKEWMAYKACAERIKSYTIGRAHCSGQYFDVWKCLDHCAAP

SEQ ID NO: 414 - protein, 49 aa, Artificial Sequence
  Description of Artificial Sequence: Synthetic polypeptide
EEDCKVHCVKEWAAGKACAERIKSYTIGRAHCSGQYFDVWKCLDHCAAP

SEQ ID NO: 415 - protein, 49 aa, Artificial Sequence
  Description of Artificial Sequence: Synthetic polypeptide
EEDCKVHCVKEWAAYKACAERNKSYTIGRAHCSGQYFDVWKCLDHCAAP

SEQ ID NO: 416 - protein, 49 aa, Artificial Sequence
  Description of Artificial Sequence: Synthetic polypeptide
EEDCKVHCVKEWAAYKACAERIKSYTIGRAHCSGQKFDVWKCLDHCAAP

SEQ ID NO: 417 - protein, 49 aa, Artificial Sequence
  Description of Artificial Sequence: Synthetic polypeptide
EEDCKVHCVKEWAAYKACAERIKSYTIGRAHCSGQYFDVFKCLDHCAAP

SEQ ID NO: 418 - protein, 49 aa, Artificial Sequence
  Description of Artificial Sequence: Synthetic polypeptide
EEDCKVHCVKEWMAGKACAERIKSYTIGRAHCSGQYFDVWKCLDHCAAP

SEQ ID NO: 419 - protein, 49 aa, Artificial Sequence
  Description of Artificial Sequence: Synthetic polypeptide
EEDCKVHCVKEWMAYKACAERNKSYTIGRAHCSGQYFDVWKCLDHCAAP

SEQ ID NO: 420 - protein, 49 aa, Artificial Sequence
  Description of Artificial Sequence: Synthetic polypeptide
EEDCKVHCVKEWMAYKACAERIKSYTIGRAHCSGQKFDVWKCLDHCAAP

SEQ ID NO: 421 - protein, 49 aa, Artificial Sequence
  Description of Artificial Sequence: Synthetic polypeptide
EEDCKVHCVKEWMAYKACAERIKSYTIGRAHCSGQYFDVFKCLDHCAAP

SEQ ID NO: 422 - protein, 49 aa, Artificial Sequence
  Description of Artificial Sequence: Synthetic polypeptide
EEDCKVHCVKEWAAGKACAERNKSYTIGRAHCSGQYFDVWKCLDHCAAP

SEQ ID NO: 423 - protein, 49 aa, Artificial Sequence
  Description of Artificial Sequence: Synthetic polypeptide
EEDCKVHCVKEWAAGKACAERIKSYTIGRAHCSGQKFDVWKCLDHCAAP

SEQ ID NO: 424 - protein, 49 aa, Artificial Sequence
  Description of Artificial Sequence: Synthetic polypeptide
EEDCKVHCVKEWAAGKACAERIKSYTIGRAHCSGQYFDVFKCLDHCAAP

SEQ ID NO: 425 - protein, 49 aa, Artificial Sequence
  Description of Artificial Sequence: Synthetic polypeptide
EEDCKVHCVKEWAAYKACAERNKSYTIGRAHCSGQKFDVWKCLDHCAAP

SEQ ID NO: 426 - protein, 49 aa, Artificial Sequence
  Description of Artificial Sequence: Synthetic polypeptide
EEDCKVHCVKEWAAYKACAERNKSYTIGRAHCSGQYFDVFKCLDHCAAP

SEQ ID NO: 427 - protein, 49 aa, Artificial Sequence
  Description of Artificial Sequence: Synthetic polypeptide
EEDCKVHCVKEWAAYKACAERIKSYTIGRAHCSGQKFDVFKCLDHCAAP

SEQ ID NO: 428 - protein, 49 aa, Artificial Sequence
  Description of Artificial Sequence: Synthetic polypeptide
EEDCKVHCVKEWMAGKACAERQKSDTTGQAHCSGQKFDVFKCLDHCAAP

SEQ ID NO: 429 - protein, 49 aa, Artificial Sequence
  Description of Artificial Sequence: Synthetic polypeptide
EEDCKVHCVKEWMAGKACAERNKSDTTGQAHCSGQKFDVFKCLDHCAAP

SEQ ID NO: 430 - protein, 49 aa, Artificial Sequence
  Description of Artificial Sequence: Synthetic polypeptide
EEDCKVHCVKEWAAYKACAERIKSDTTGQAHCSGQYFDVWKCLDHCAAP

SEQ ID NO: 431 - protein, 49 aa, Artificial Sequence
  Description of Artificial Sequence: Synthetic polypeptide
EEDCKVHCVKWWMAGKACAERNKSDTTGQAHCSGQKFDVFKCLDHCAAP

SEQ ID NO: 432 - protein, 49 aa, Artificial Sequence
  Description of Artificial Sequence: Synthetic polypeptide
EEDCKVHCVKWWAAGKACAERNKSDTTGQAHCSGQKFDVFKCLDHCAAP

SEQ ID NO: 433 - protein, 49 aa, Artificial Sequence
  Description of Artificial Sequence: Synthetic polypeptide
EEDCKVHCVKWWMAYKACAERNKSDTTGQAHCSGQKFDVFKCLDHCAAP

SEQ ID NO: 434 - protein, 49 aa, Artificial Sequence
  Description of Artificial Sequence: Synthetic polypeptide
EEDCKVHCVKWWMAGKACAERIKSDTTGQAHCSGQKFDVFKCLDHCAAP

SEQ ID NO: 435 - protein, 49 aa, Artificial Sequence
  Description of Artificial Sequence: Synthetic polypeptide
EEDCKVHCVKWWMAGKACAERNKSDTTGQAHCSGQYFDVFKCLDHCAAP

SEQ ID NO: 436 - protein, 49 aa, Artificial Sequence
  Description of Artificial Sequence: Synthetic polypeptide
EEDCKVHCVKWWMAGKACAERNKSDTTGQAHCSGQKFDVWKCLDHCAAP

SEQ ID NO: 437 - protein, 49 aa, Artificial Sequence
  Description of Artificial Sequence: Synthetic polypeptide
EEDCKVHCVKWWAAYKACAERIKSDTTGQAHCSGQYFDVWKCLDHCAAP

SEQ ID NO: 438 - protein, 49 aa, Artificial Sequence
  Description of Artificial Sequence: Synthetic polypeptide
EEDCKVHCVKEWMAYKACAERIKSDTTGQAHCSGQYFDVWKCLDHCAAP

SEQ ID NO: 439 - protein, 49 aa, Artificial Sequence
  Description of Artificial Sequence: Synthetic polypeptide
EEDCKVHCVKEWAAGKACAERIKSDTTGQAHCSGQYFDVWKCLDHCAAP

SEQ ID NO: 440 - protein, 49 aa, Artificial Sequence
  Description of Artificial Sequence: Synthetic polypeptide
EEDCKVHCVKEWAAYKACAERNKSDTTGQAHCSGQYFDVWKCLDHCAAP

SEQ ID NO: 441 - protein, 49 aa, Artificial Sequence
  Description of Artificial Sequence: Synthetic polypeptide
EEDCKVHCVKEWAAYKACAERIKSDTTGQAHCSGQKFDVWKCLDHCAAP

SEQ ID NO: 442 - protein, 49 aa, Artificial Sequence
  Description of Artificial Sequence: Synthetic polypeptide
EEDCKVHCVKEWAAYKACAERIKSDTTGQAHCSGQYFDVFKCLDHCAAP

SEQ ID NO: 443 - protein, 49 aa, Artificial Sequence
  Description of Artificial Sequence: Synthetic polypeptide
EEDCKVHCVKEWMAGKACAERIKSDTTGQAHCSGQYFDVWKCLDHCAAP

SEQ ID NO: 444 - protein, 49 aa, Artificial Sequence
  Description of Artificial Sequence: Synthetic polypeptide
EEDCKVHCVKEWMAYKACAERNKSDTTGQAHCSGQYFDVWKCLDHCAAP

SEQ ID NO: 445 - protein, 49 aa, Artificial Sequence
  Description of Artificial Sequence: Synthetic polypeptide
EEDCKVHCVKEWMAYKACAERIKSDTTGQAHCSGQKFDVWKCLDHCAAP

SEQ ID NO: 446 - protein, 49 aa, Artificial Sequence
  Description of Artificial Sequence: Synthetic polypeptide
EEDCKVHCVKEWMAYKACAERIKSDTTGQAHCSGQYFDVFKCLDHCAAP

SEQ ID NO: 447 - protein, 49 aa, Artificial Sequence
  Description of Artificial Sequence: Synthetic polypeptide
EEDCKVHCVKEWAAGKACAERNKSDTTGQAHCSGQYFDVWKCLDHCAAP

SEQ ID NO: 448 - protein, 49 aa, Artificial Sequence
  Description of Artificial Sequence: Synthetic polypeptide
EEDCKVHCVKEWAAGKACAERIKSDTTGQAHCSGQKFDVWKCLDHCAAP

SEQ ID NO: 449 - protein, 49 aa, Artificial Sequence
  Description of Artificial Sequence: Synthetic polypeptide
EEDCKVHCVKEWAAGKACAERIKSDTTGQAHCSGQYFDVFKCLDHCAAP

SEQ ID NO: 450 - protein, 49 aa, Artificial Sequence
  Description of Artificial Sequence: Synthetic polypeptide
EEDCKVHCVKEWAAYKACAERNKSDTTGQAHCSGQKFDVWKCLDHCAAP

SEQ ID NO: 451 - protein, 49 aa, Artificial Sequence
  Description of Artificial Sequence: Synthetic polypeptide
EEDCKVHCVKEWAAYKACAERNKSDTTGQAHCSGQYFDVFKCLDHCAAP

SEQ ID NO: 452 - protein, 49 aa, Artificial Sequence
  Description of Artificial Sequence: Synthetic polypeptide
EEDCKVHCVKEWAAYKACAERIKSDTTGQAHCSGQKFDVFKCLDHCAAP

SEQ ID NO: 453 - protein, 49 aa, Artificial Sequence
  Description of Artificial Sequence: Synthetic polypeptide
EESCKPQCVKAWLEYQACAERVEKDESGEAHCTGQYFDLWGCVDKCVAP

SEQ ID NO: 454 - protein, 48 aa, Artificial Sequence
  Description of Artificial Sequence: Synthetic polypeptide
ARTCESQSHRFKGPCVSDTMCASVCRTERFSGGHCRGFRRRCLCSKHC

SEQ ID NO: 455 - protein, 49 aa, Artificial Sequence
  Description of Artificial Sequence: Synthetic polypeptide
EERCMPQCVKSLYEYEKCLKRVENDDTGHKHCTGHYFDYWSCIDKCVAS

SEQ ID NO: 456 - protein, 49 aa, Artificial Sequence
  Description of Artificial Sequence: Synthetic polypeptide
EEDCRVHCVREWMAGRACAERDRSYTIGRAHCSGQRFDVFRCLDHCAAP

SEQ ID NO: 457 - protein, 4 aa, Artificial Sequence
  Description of Artificial Sequence: Synthetic peptide
GAGA
